United States Patent Application Publication US 2026/0265781 A1 - sequence listing, part 5

SEQ ID NO: 22 - DNA, 26290500 bp, synthetic construct (residues 8,763,501-10,954,375 of 26,290,500)
  source 1..26290500: mol_type = other DNA; note = Hot spot 1 - Chr 3 contig ref|NW_020822499.1 from Cricetulus griseus
actgatttgactctgagtgaagaccaactcctcggatggacacacagctcttggccagcattggtcctgcccagatggatggttttgcaattacccacacctcacagcagccatttcttcattactgaaagctgcccccaattgtcccaaaagccgaattcaatctgcagttcccccagtaacgtgctgtgaatcatttggggacaaatctggattgaactgagtccaagtgtctcttttgtgagacagaagggaagtataagcagatactatagtcacccagatgagtcagccaggaattcatgaagtgattcataaatcgttataaagaccactaaagtctactaaaatggagagctgtctggctatacaaagtacagtattatcgttggactgttttttttttttttaaagatgttaaatcagatgtgaaatccttaaaactgtgctttttcttcttaggttttgaaaagaatttctgtgcccccccccccctgcagtggaccaacagcaagccgtttttcattgattagttttcacagatgaattttaaaaccccaacagatgatactctacaattccttggggggaaaaaagtctctgagaaaatccattgtaggccagtttgtatccattagttctgctccctggcagcaaatcaataatatttttgtgtgcgtacaatgaaagtagctgttcacgtgtgttctcccttctttggtgggagaacatccccagtggaagagaaaggggatgtcagggaaattatccaaagaacgtaccaaccaaagcttaatctaagtggtcatggaaatacaggagtctcttctttccacactgttaagacccaaagcagtgctacaacataaccccaatggttccctagaaccattgtgtagacagcacaaacttggggcggcaagaaatgggtataggttcgacttgcaacatcatcatcagtaagttttgttttccataaaatatatctgaaagctgaaatcaaaatgatctaggcttatagacaaggaaagacgcccttaccaaaaggagttgtacactggaaagactgatgcctgactagcttagacacaaagaacttacgccaactgagcaggtttactaaagccaaggagcaacactttcatggtcagatctttttttgggggggcggggagcgggtttgagaaagggtttctctgtatagctttggaacctgtcctggcactccttctgtggaccagctgaactcacagagatccgcctgcctctgcctcccaagtgctgggattaaaggcgtgcaccaccaccaccaccaccaccattgtcaggtctttttaagtcagtgtgttactaataccctttctactgagtaatgataagggttaagatttcaaatacccttggaagtgacctcctattcctctctgaccctatcccactggcttggtttgaatttgaggagagaagtttgtcatgacttactgtaagagagtggtatgtgggaaagtagattgccgtggcagggaagtacctttaccattcttgaccttttctgttttcaacaaaaaaaggtactccagatccccatctagaatgttccataatggcactaacattttaagtcagtcccaagaacttagacccttacagactgcaaagctcattgttcctggaactggaaaatgagccagatgagcgagccactgttagtttgtgtatcagaattgtcaagacagaaaaggtttcctcagattcctgttttgaatctgagcctaagtgttctgacgtagcatcaggactataatcttgggcagtttgtaggctctgggacaccaaaaacatgtccccagatgccctacatggacactgtttagatcagcatccattctctaagcagccactaatcacctgaaagttgtcagatgttcctagtcttaagtgtttggctatccctgacttctgaatgtaaagttctgcacagtgctccatcattccatatctactgtttccttttctgttacactcacttgctagcccaggactggttttgacttagtcttagatgtgcttgcttgcttgctttctctgacttctggaaattcagagaaaggcatcttcagttgctctgctctgtgtgcttacagcagctatatactcagacagtgcccagtatgtatctcctgaatgaaaaaaaaaaaaatagaactatcgcatattttacaattctgagcaaaattgctgtggaagctgggagagttggaggatttacagacttccttgtctagtaagagagcaccagagtccaaggctgtgtgctctgactgctcacccgtttgtctttccgcagccacctgatcctccccattttctgtatgtgaacttgaactgtgttcattccacttgggacctactgtcttgtgatagtctgggcttagctgcttcatcttgaggaagggtgacctctttgtgctggccttcccactgccatgtggggagcctgatggtggtcaaagtaggcagggaaggcaggaaagggaggtactgaacggaaggagcatggccaagtgattcgctgttttctgaagtgtgcataaatgagtatttgcaggaaccttttaagtgccccttctgcaggaggctcatttatgaggctttaaaacccctcccttgcctccctttcttggcaaaccgttgctcatcataaggtcataccaactccccaccaagtgagtggaaatggttgactcagttctggtttgcttttgtgtgctctgtttctggtaagcagggattttcccctagtctgtcatgtgcctacttgtacagtagttgtctcttttgaggtcctgtgaaaggcgtagcagcccaagagggaggaaatctctgaaatgaccgttgcagatcagctgacgttatagagatgagcatagagagggtaccacaagatctttcttatgcctctctggctcactgtaactcagaataggtgatactgccttgacctgacatatttgagggaggcaataccccaaatggagacattttctgtgtcatcatcatcatcattacttagaaaatgggaaatagggaggctcccttccctgtagccacagtaggaaaggtagttgcactcaacaagcttcaggatcctttctcagtctccgttgttttgttttgtatcaagtagtctaaaactgctgaattccctgggttctgtggcttgttgagtcaaatgtgtaacatctgtctttctgggtgtcttgttttcagatgcgtctggggtccttgcctctaactgtaggatcctgttttcatttccacattcctcttctgccctcaacctgatttgagtttgctcttctgctctaccttgagctggttatcaagcaatgtagtacatataaattaacagagaggccgtagattttttttttagttaaaatgctgtgtgatatgagaacctggcccacggaatccgctaagcaggcctcacaggagctgatggagaccgaagtggcaaacacagaccctgcgtgagtctgagcgaggtcctctgcatataggttatggttgctagcttgctgttcttgtgggacttctaacagtggcgtgtctttggctctttcgtctgttgttggaacccttttcctcttttgggttgcttcatccagctttgatatgagggtttgtgcctagtcttactgtaacttcttatgtcgtgtttgtttcgttgaaaccctttgaggcctgctctctttggggggagggaatggcagaggagtggatctgggagaaagggagggtgggggtggaagaagtggagtgaacagaaactgtgattgggatttaatgtatgagaggagaataaaaaagaaaaagtactgcgtggtgtttttaggcagaaataaaactgattctaaaaattcatggatgaaaacaacaaaatgttttttaattgattcttataaacgtgtataaattgattctgtgcttgaaaaactttcctatttataaatagatttctggagctggaatttaagttattgattcttacttgcttcctcatttctggcagttgtctgaaaaagattatcacagatcactttttttttcattttttgaaacagggtttctctgtgtagcctgggctattctggaacttgctttgtagaccaggctggcctcaaactcatagaaactcacagtgagccaccagcacccagttatgatcgcttcttatatataatttctctataaatgcaatagttcaaatttttgtactgactccttttaaattaaaggctacattgtgaaggtttatttcacagagggatatgtatttaaatttttatgaatattttatgtgagctgaaatcttggtcttcaaattatattacccctgtgctgtgctgtctcacctgtgtgaagaacacagagggcacctctgaattagcaaagagcagatactagttaaacagaaggcataatattttatacttctaggtcatgaaattatgctaaaaccttggtatatacctgccacagtttttccattatttatccttgtcagtattaaataatatatggtagctgagaaaatatgcccaggaacttatatgaatagctaagactaatttggaatgagtatataattatataaaaccatacacacagagaatctatatctagagtaatataatctacttataaatgactgaaaatattttaataaattatacccctgtagttttgcattttctatttcctagttagtagtcatagtttaacctttgaccctgttgcaaatgacaaaaatcattggatttttactaagaacaactttgggctccctttgtactccttactaagccaattcatgtgattcagatggatcaagttgtttgtgagtaggggttatatcctcagattgttccagggtccccagattgtcccagcatgtctgtctactttgcttcttcagcactatactgaaggaatctagcagaagtcccagcaggaaaacccagaggactttcttctagcttgtgtgccttttgtctcaaacaaagaaaacaatagaggggcattaatttttgtgtttcccaaacaaagttgaaatgttggtgtgattgcatgataacgatataggtcacactttgctattcaaatccctctcctctcccaccccaagaaccataagaacaggggcttccaggattgggtgccagtgtggactccataattgctcattcctcctccatgagctcagagggactttggagacaccataaggacatgttccccagaaaatagcctccatatggggaatcctggcttgtgtgttttactagatgttctcaggccagtgccaggatttgtttgctgtgttttctctcggggccagtcagcatagatttttccggataatcccaattaagagggtgtgctagaagagtgcacatgtaccagcgcagcgcaggacacacagccatccttccctttccttagaataaaaacttcagtgaccagttcctagttatcctgtcacgtctggtctacttccatgctctgacctctttgctttggctccctgtcttctcttggctcctatgcggccttcttagatagtttcattacccttcacaagtgaaatgcaaaatgaatactgtatttgtcccatactcttactccttcaacataaatgctgaagctctgtcctatgcttcagaaccttttcaattactttgtaaacttgtctaatgcaccttcccttcttctcagctatgcccaggcttgtggagtcatttattcttataaagcaactaatgtcacagatgatgacctgcttttgctagtgcagaataaagttttcttcctgcacagtatcaacaggcaccatttaaatgttttcatgttggtgaactttggagacaagaatttattttttcacccaaaactattttgctgctgattctcatggcattgaaagaccgcccccccccccagcttctttctctactatgagtatcacagtcctctgctgaaccaacagttaatcctgttgctttctctgtggacattcccaactgcaaggctgttctcagaagtctaccttccttctctgttagacaataaaggtcattctaaatcttgtgactcagaacctcacaatgagaagataaatatgcagttggccagggttacttggtgatttctccttgtttaaataccaatgtatcttctttcagaaaccagtagtcctggacttggggctgagggtacagcccaatgctggagtgcttgtccagcatgtacaaggcattgggttcaacaaaaccaaaaaaaccaacaatcttgtgattgttacacatcatggcaaagaatgctgtacattgcattccctctacaccatcaggaatgttctttacccagcacagaacccaaaccaaactctcaggttctgggtttcaaggcacatttgacctttgaggtttaagttaatttactcctggcaagaaagaatgtattgtttaaggagactccagttagtgggggtcataataaggacccataacacttcttggacctcagatatgccttacaaaacaaaatgtttatgagctaagtgtaaatgactcagaaacatacgaatcgaatttcccctaaaatgtgaacggattttaaaattagcaggaaaagggtctggcaatggatgtgctttgaatttcacaaaacccagaggatttgaaatgcagtttaagaagcttgacaagcccaaactgtgactaaggttttctttgttggtgacttttcttccctctgtttctcagagaagaactcagtggttggaaaggagagagaatggtttttgaaagagtgtattgtcacacttgtgtagggccagagtggggacttaggaggctttggagagttagtcatgctgccttttggaattgttttcccaggtttgcacctccgactccatctcctcagcacatgagcccgggaagaattccagctcctccatcattgctgcagagagcacagcctccccatacccaacagccaccaggctcactcctgaagtcctaccatccagaaacaaaccctgcttttcagtcaaatggtatccacgtccatggtaagctgggctggcagccctttgagttttgaaaggcaatgttgcctttaatcaactgtcctagtgaccgattgtgggtatcagatgttctgttttatatcagacttggacttttagatccccccatgcacacttattaactcacttattagacatggagtcctatagtgttttcctcagataaactggcttatgacacccatagttgtcagcccgtggcaatcatttgtgtttccatttttgtgacacctcaagagcaggctctagcaagatcattctgctcctaaatgatcaggagactgtgtgaaaggagccctgctatccttgtctgtcatctccttcccataagccaggtcaacacatggtccccagctctgtcgtctcccctggctctgaactgtgtctcacctgtatttctttggtagaacttccattctctccatcttgtagcttatctgaaaaacaaacaaacaaacataccttcttcattaatatataagcttgcttttgaggccagaattatctgacccatcatcatatctcttagggaactcaacacatttcttcatgtataataatgattatacatattcatgtacaaagaaaagaacataggaaatgagaaatcacagtggttttcagtttatgccggtgttgtgtttaacaaggaccacatttggaggaatgagtctgcttcagtttcttttctttatataaactcatcttgtcagttcaagcaggtacactagtggacttccacagaaaactgaaatgctaaaccatacagactacatcagccaaatccatttacttcctgtcgtcagaattctagatgagcagaaatgatactgtccattgagacaccttctgatgattctacagtgagtctttcatcatcttcctctcaccaataacatttatttatagggttatcacttggaatgaatggatcatatcccaagccagtgtttactctgtgtgcgaataagaaccctagatagtagactccaacagtactgtggtgccaaacctgataagagcctcaaagcagagccttgagcagcaaggaggagacaaaaaagtgacagtggccgtcggcaacaagggtggacatgggaaagccagcggcactggctctaagtaaagatccacctatctccctgactcgccacttgtccactgtgtcccagcaaaacttagacttttcagttcagtagtcatttttgccctctcctacttacgagcatgttctcatacttgtattacagcaggacatggttttgtaagtgcctgctgcgggtgctcgaggtgagttgtataaaaaagaacaaaggagttttcttcctggccagcagcttgtctgatgaagggagacccaaggccatggtctggaaagctaccagcaccaatctaggagtgagatgggcagcatggatgtgggctctgtggaagtcagagctggtcacctctgtgaaacactgtttcagtgtccatacattggtgaaacactgttttagagtccatacattaacgcttctgaaattgagcatgtctctcagtcagtggcatcctgtagccgatagccattgatctatctttctggtggtgtatagactaatagagcaattcacagtcagcattgtcctaggtccagtgaaatgcagtataacctgctttgattacagatgtgaaacccacttgtaaaaactttaaaaattaacctatgtgtcgaaaaactaactggaaagaaatttagctaaagtgcagatagtttagttttgttgtttttgtttttgtttttgttttatcaggctaacgcttagtgtcactccctcccctttattttctgtcttctaacaaaactttatgagtgggtatgaaggggtccagtttgtgtgggactcctgtcaactctaaactctgtgcgtgtgcaggtttttgtgcctgggttctcagtccctgatggggacagtgtcatctcctttcatcacatgttacaggaagttggtaagaagaacaccaggcgcaggtgtggggctcacttcatttcagcctcttccttctccttccctttctgtatgaggctctgggaacaagggtcatgtgtgtagccccaggacaagcatattacttggtgcagagtaggcatttaataagtatttactgggtaagtaattggcgctttctcattcaacaaatgaataataaaccaagaggaccggagagcatcctccatgccacattggcaaaatactttccctctgcatttctcatttgaaaaataaataatgcatatatttccagcttgaaaatgttgagctttttttttttaacttccactttcttaatttttaaaaacttctgtagccaatgagaaacagctaacagcagccagaaattagtttcagaatagagctaggggaaatgagaatttgtgacatgctccagagagatggccaagtggctatggtgatgagattgcaaagaaagtatctatgctgtagccacctggtgaaggggtagggacccgatgcagtcttattgttcctcttagcaggttcctgaaactttctaggtgcaagccaggccttagataaggacagaatgtgtatgctgcttttcaaggagtgagtgaaccttcttacccagatatgcttgttagctgcagctgtccccttttgttgctcagatttactggataaagttacacagtagccttgtgacagggaacttcatcccctactaaaacaccattttttaagccacagactgtcagaatttttaactcaatggtcacagtgaatctttgtaccttctttgaagatgttcatggttttaaagagcatcacagcccatcccctctgtctaacctgtagcagaggtcagggagaaatgccaccactccatctgcaaaaatgggagctgagacatagaaagatataaaatgtctgggcattgctaccctggcacactatgtgggctttgcaagacgtctaaatttccaaactgaatccataatcaaggtgatttcaagtcaaaggcacaccaaaagaaatacgaatttacaactatttttggaaaatgggatgcctcttcttacatgtgttgtcttatgtggaacttagaaggtcagagttcaaagggtcttcgtgatgaagaagaaaaagaagatcctccaaactttgttaatcatccgctaattggtactgagctggaacattgtgtgctgaacttgtattttggatacactttgtcagcattaacagcaactctctctcacatgtcctcaccttggttttattgacacccacaccacccgttcagtctgcctttattagtaaagagaatgagatgtccttcctacttaatgttgatagaattttcagcctctgtttgggcgatatctctaaggcaacttcttagtacacttgatcttttcttttagatgtcaacataaggacactctttccaaccatgtaagcttgttctttggtcttttctttcttgtcagggtaattctcttgcccaggcaagcttcagaactttgcctggattagttgccagagagttgatatttgtacattttgttatggtacttactaaaggataatttctttttaaacgccctattcactgctgattgttcaaatgccatgggaattcctagacgagcattttcacagtcttcctgcttctggacacatcaaagagaggccaagttcagttcaacgggtgtttgttggtcaccctctaagtaccaggcaacgagaatgccatttaatggctgccatactgcagtagttaaaaggggcaaaaggaacctgatgtgttacaaggaagatggcagtcaaaggttttgaagaagtggagtatgcaaacaagagagacactggagatagtgtcctgctgtgagcacaggttaggccccaagtggaggagaggacacaggagaacaaggtggccttagcaagaaacaatgcatcacattcagtgcagtcactctgatgtttttcaaacatcatatagagatctgtgcagagagtggcccaggataggcagaaaagccaagctcttgctatcagaattagattgcgctgtctggaaaactcagtaactggaagggagtttgcttctctcagatgcaactggaaaattggagggatgatagaattaatgtgggattgtgtgtgttcacaatctttctgaagaaaggaagggagggtagaatagccaagaagtggagacacactccatttaggtgccacatagacaaagacctttcagctttgtctttgaataaaattagaagtgaacacaaccctaggggctgcctgctcaagagaggtacacacctcaccttgcatggagctcagtttctatccctccctttcacacagttggcatggagaacctacaggccacatgccctactcctttgtgtctctccccacccacccccgtggtgtgtgtctgtgtgtttgtgtgtgtctgtgtttatgtgctttctgtatatatggatgttcctgtgggtacttgtgtatgtatgtctgtgtgtctgcgctgtctgtatctgtggatgctcccttgggtgtgtacacatgtgcctgtgtttatgatgtgctatatgtatctgtgggtgttcctatgggtgtgtacacgtgtgctcgtggctgcgtgtgcacatagaatcagaggacaatgccaggttttttcattgatcatgctccacattacgtttgagacagggagtctcacgaaaacgcagagctcactaactggctagactaactagctaacaacgtccatgaatctgattgcttccatccccccacagtagggaggttgcagatgcgcatatcaatacccacagctttttatgtggatattagggatctaaatttgggtcctcatcttgtgtgacaaatattttactaattggactatctactctgtccccattttgtggatttttttttttttttttttgagacaaggtttctctgtggctttagaggctatcctggaactagctcttgtagaccaggctgtcctcgaactcacagagatccttctgcctctccctcccatgtgctgggattaaaggcgtgtgccaccaacgcccgacattttgtggatttttgatagcctctcataagcctatagcctcaccgaactggatatgttacctctgtttcctgtatttgagtactggtttcctgaagacccagctatttcatgtaagcatttatgcagagtgtgagcttccaggattattttttttttttatggtggtgtagtagcaacagctgggttcaagtttattgtttttacatgataagatggccactataagagcatgttggatagagagacagcttagttgagccaagccaataaatctcctgttataccacagcttctactttgtcatcctgaaagggggctctcccatcatcctggtcacaaaaggaatgctgatgctgatagtctacacatcatatgctgactttaggcagagcagaagacagaacagaactaatgtagtacgtgacctctcgaaaagctctctctctctctctctctctctctctctctctctctctttctctctctctgtgtgtctccctccatccctccctctctctgtcttttctcccccccccccgtatgtgtgtaatgctacctatctggaacacaggtccattcattcttcctcttgttaatcagtcactccttctaggactctgccaagatttttacccatctcctccaacctcttgggtgtctcccgggcttccacggcttgttcttatttttcactgctttggagttttcagttgccaacatcccatcatccatggtccagttattcggtttcattaggaaaacaccatgaggctatttgatgccagcatagtagcagtgggaagtgggagcccttgcttttggtcacagcccctgtggtttataagccgtctttttcatgatttaaaatatgccctgtctgtgggcccccaaagaagtgagccagacagtgtccacacaatggtggcattttcctacctcagtatgaatctgtaagcttgtcaactcagttcagattgactgcatgaggaaacaaagggtttctagctaccaacatgcttcaaagaacaaaacacattataaatggcttgtcctaaccaacacattgttccagctctggaaatcatagcacactatgtaaatgagaatgttgtggcaggtaggagttcagttcacctcttgttccatggccatttactgaccatggttgctcactggcactttccatgaagagttttttggggtattgccatacctgatatcattgatgggatgttaagtctttaaaggttaacttttaaggcatttttaaaaagacaataaacatactccccacatctctgggaaatttagtcacaactgtatatgtgattgcaaaagaacacagtctagtaattgtattgcttaagttgggtgcgagcatgtcataattctgaaatttcaggaagacacatataattgattagaaatcaaatgtcatcaacttccagaggaacttatgagatatttacaaaagaaatgagccagtgagtgtacttgatgctactcagatgttaccagcagtcctaatcaggaattcttttcagtactagctctggtattattaagcttatacagttctaaggattgatgattagagtcacagaaatccttaattactctcatatacttaattactacacaattaccccaagaacagttttacataagtagtacttgataaattctgacagcgtgctaattctacaaaaacaaaagttaaatttaggtgtgtatgtgttggctcagtcagcgtttcaacatcacatgttttgtgggaaggattgcaaggtggtcgtctgcctgagtgatggattatagaactgaacagtgaagaacccacatctgtggcatgaatacttgaagaattggcacacagaattttatgagcgagcacacacctgaccacacagattgaacctaccagattaaggtgctatgttttgtcagtaagaatacgaaagtgactaactccctaaatcttgagtctactcaagacagagagcatattgtcccaaggtgcttttcataaagtgcttaacagataatttttaataagtatgaatgaatgaaagaagaggaagaaaaggcttcttatactgaaggagctagccttgacaaactggggcctcatggtcaaccatatcatatgtttctcacattctatgtgccatcatcttttgaacctgttctgctattaatggccctttaaaaattaatgtcctgcttttctagcatgtctcttcagtttacatacatgtatgcttgtgcatttgcagcaatatactatctcctggtggactttctcaagaaatgtttctgaagaaaactttctaggctaaagtgtttacattttggaggtagatgggctgccatgggtgtctctgtgagactcccaggtttagtctccaaccagtagacatggctgtcctgtggcttcttggtggttgtcaatatgttcagcaaagctgagtcacttgctgtaatttttcctttagttagcagagtgactgaacatcttttcatgtcaccgttgaggagagttttactaatagagaatcaatggcagagccggtgacttgggcttctgcatcattttagctgcctgcctgctcattcacccatcaggcaggttgtataccggcagcgaagcactttagtttttatgggtttctgtctcttccttcctccccccctccctccctttcttcttttcttccttccttccttccttccaaattggaactcaggagtttattgaagggagggaaatacctagacaaaattttccatttcatcggctattgtgacttgtccatcacaaaattttaaaagtgcctgtggtaaatgttcgatatgaagtggtttttcattattttgaggaagtaataacaggttttcaaaaggaaatatcctcttatagttgaaactcatgaaatttggcctctagtgaatagaattttgaagaaaaatatttttttcctcataaccctattttaagggttctgctaaactccataaggatggacaggttaatgggcaatcttcgatcctttcattttagctggaattatcttttgtacatatgataaacaattcatagtttagaacaaaaaagtgaagagctgtggagagagatccattaaagggaaaaatggaaaaccacacatcaggaacatccgagttactggtaatgaggtcactgtgctaataaaatagaaaaccaaacactaaccctgggagtggcttggtctgcccccaattggctgctttctggtgagcactatgttgcaaaaccatcccagttgccttagaatttcttgttggtttacttaaaattggtagggctcttttggattgcaggaatttttcttctctaacctaaccaaattgttcctactaacccctccatttcaatcttttgcaaggccttcaagaactgcacctcaaaagtcacaattctggtgaagtggaagcatttagacatttcttcttgatcatttgagtgtgaccaccagccactccctttctgcctttctttaccaagcccacaacctcttatcacacatcccaaagcaagttctcagatttctcatctttatggcaacatgacccaggaaatctgaatcagtcccataattacccaagggcctttgcatcagcaaactaggcccaatgtagctgtttctcagcaagagtgtgtggttaattcctacattcatattaacccatatgctatgcttaaaatgtactcttacagacttcattgtttgtcaggtttcaggtaactctatagaaaccattcttcattttaagtatgtgtgggaaaagaggcagtatgttgttaaccttcaattctcttacccacttctgtttctgccttcagggttatttaatggtctgtctggcatccagtggaaaatagtgattcagaggagcaaaaagatccatggtttctggatggagctcatgctaattagttttaactgtcaacctaacatagcctagagctacctgagaaggaagcctcagtgaaaagattgtccagataacatttgtctgtgggcatgtctctggggaactctcaattatttattagtgtaggagagacaagcccactctgggagacacaactcctaggctggtcatgttgagctatataagaaagctagctgtaaatgaccctgcaagtgagccagcagtaagccaggcctccatggttcttcattggcttgagtttgttcccaggatagagaacgctgccttcagattccttctctgacttccctcagtggtaagctgtgacctggaagtattaaccaaatacagtctttcctccacatgtggatttgactcagagtgtttgaaatagcaattggaatcaagctagaccaaagcccttcatattttatcaccttagtttatcttcttccacttaagagaatttccatggtggaaagggaagcaacagcattttctttaatttatatacctacatgtgcaagtatcctgattcttagtccttcaactcattgtgttccttcttaccatcaatattctcacccaagtctccagcaatggttccattcactcattcattgattgattttcatgtagtcattttctgatatgtaccaggtcctactgtgactactgaacctacaataatgggagaaaaaaaaaagtccatggctcttttgagtctgtatgtatctaaggggtatctattatgtattatattagttaataattgtgttctttgacaatttaaatagattttgagttcagtagtcagagaatatttcctgcccacagaattgtgtaatctttttgttccctgtgaggcgttacacatttctagatgcatattgcaaacttaaatataaaaagtgtgatgtgcaatgggatgagattaagtaagaaaggaagatccctgtcagctggatgtgctcatcagagttaactcccaaaagtggcagtgggaagattttagcttagagggaaaggtggcagggttgggttatacacactggcagtcagtgtccctaagtttttaaaatacacacagtcacattctatggtggtcagtggaagaagatgagaagggtcctggtatccagggacatcttttaggtttcagaagcactatctactctcttatctcagacccacataaacatttcctgatactcttcaccctgagccaagattccatcttactctaggattggagagctggaaatttgtataaccacagatttggattctgagaaacagaaagtcatctagttagaaaagcaggtagaactcggggctttgtttacagctaggcaatagaaatctaggtcacaagattattaaagagtcaacagtagggagactgaatcattcacataaagtcccacattttcacattggccagggactggcacataaaaggccctagagaggaaggagcctggcaaatctgactgatgacttctggccatgcagtccaatctcactcaggaccccaaggtccagcagaaagcatggtccagaacaaagaaaaaagatgcccctcagaagaactctctttccccattacaaatagaactcgggtccttggtattgtaatttcaaatgctttaagaaattattttcaaatgatgtgtgggatactcctcattaaacacaggtttccaggcctttttccaacagtcctgcttctctgggtctttctttgagtccaggaatacacaggttcttcccaggtagagctcgtgctcgggtgtccactttgagaatctctggccttgttctcaagtagtccctcaccatgcactcccccacatccaagtcagaaagaaggattcgcatcctggtcgttgtcatcttccttctccctttctgtcctgcgaggttccacacatgcagtgtggtctaagtgctttagaaagccaatatggcctttgtggcaagacggaagcagataaagtcactaaacctgcattctttgccatacttctcttgtactgctgtaggcctaagtccctctaagtccacagtgcttgtgggcctttgaagaaggagcctgacaaccatgtgcatatgtggtccatgtgctctagcgccggtatttttcatgaactgtgccagcaaatagaccaaggttagaatctggcttctgatgaattactctagcatggctgtttctttttcagtaagctggggacattatagcttatctgaaaggctgtggtcagcataaagatggtctatgtaaaaccttaggtccatgcttggctttaaaccaacaaatacaatatcctttgcttttttagaaattgtccaagtagacactaatcaaaatactctttgggggtctaggccccgctccaattgatatgacagactttgaagatcccctatggaaggcctcaccctccgtggggagcagaaaaggggttgggatgggagggacaagggagagggaactgggattgacatgtaaaagaagcttgtttctaattaaaaaaaaaaatactctttggtaaatccatgcgtgggaactgccattgagggagctctggatttagtggctactttaattctgttgctgatttgcattaaggtaaaggatagactaataaataattccaaatatctggctacttagaaatattagtatggttggaagagtttcctactttatttgcatgacatcaaatgaaccaattatcagtcgtaaattcttcaacagttctctgcttctatgccatttgtttcaactacctagtttcaaagaagaaatgtcaaatggctatgtatgaagtactctttaaggtgttttgacagtaaagtatctggcaaataatgaatgtgtattctctcaggctgttctcttgagcaaaacttgagtgcatggcattggtctgataatacatgacccccagactagagacccatggccttttaggggcttcttgcctattaatgccctcttctcattggcctctgtactggattacagaaggtattcaaagggagaaggtcacagtttcctacgagaatcaaagccatgatgtggatgaagaaatgcgaagagccaggagatgagaagatatttctcttctttgtccctctctcgttttctgccaacatttgtattttcagagatggcctgtgctagtcagttattgtcaacttgacacaaactagacacatctaggaagaggaaacccaattgaggaattgtctgcatcagaatggcccatggcatattctcttgattgactgctaattgatggaggagcccagtccactgtgggtggtattattcctcacttagtggccttaggttatataaaggaaggtagccaaaagccagagtaagcaatcaggcaggcagtgtttctgtgtggtctctgcctcagttcctgcctggagttcttgccctgccttcctcagtgatgaactgctacccaaaattggaagatgaaataacccctttcctctccacattctttttgttcatggtgtttatcacagcaataaaaagtagctagaacatggttttaatgtgggtgagtgtggagattgctaatctgatgttagtgaccatgagctttaacttaagtgagaggacccacgtgactgaaggaagcctctcatctccagactgcatagagggctgtttctggtccttctttcttttaagtggcctcttttatctttcctgtgcttagcatctgtgggcatagcaaaccctcccctattctaactctgcatcccaatgctgagtgaagctgagtgaagctgcacaattgttaaagtaaccacaaagacgatgctccgttgttgtgcagaggtaagagctgcaagtgtctgtgttaagtgaaatgagttttagagagaaagaaagatactggtacagctccacccattaccccgtggttaaagtagcacagatgtcctgcggtgaaaatgtttattgagtgactactatacagcagttgctattctaagctctgtggacaaacagtgtcaaattagatgatgtccctgacttcatgaaacatactttttggggggggtggaggagtatgtgatgtacagataataatagagatgcatacatttatcttttttttttttttttttggttgtgagcctagcctttaatggctgagccatctcttcagcccacatgtatagctttttaagactgtttcttgaggcagttttaggctaacagtaatttttgtagaaaataaaggtggttctaccagcctcttttgatttccaaacttggctgaaagatacttgaatacaaggacagacgatcaaagatctctaaggcaatctacaaagaaccattgggacattggaggaaaaaaaatcccaagagccagatagcatatttgcactgtgtattcctatcctgatactctgagatgactcctcccagtgtccatcatttgggtgcatccacctccctatgtaggcaacaatcatatgactaagggagaaattctacacttcctaaagtcatccataaaattacagtctgcagaaaaataattggtcttaaagctcataaatacacatcctttttcctttggctagaaaaaaagaaacaaacaaacctaaagggctcagccaggcattgatatttctgagtccccatccaggctcgggctgctcagcagtgctggaaagagggtgtcttcactgagatactaagatggatcttcagtagcgctgggcaggtccttccacttaggcctgccatcacaaggtcatataaatgaactatgtgaaaacttgatgttttgctatttattcttcctgttgcgtacactgcaaaacagaaaataatgtctgtttcatccctgcatttatgtgatataggtgaggtatacaaccattctgccccatctctgtgtgtaactgggacgtttgtctgagctacccagcatcttctctggagtcagagtttagtggctgttcctggcatcaccatcaagtagtacaagaacttcatttagctaacatggtgtatgacatgacttgacacctttgcaaggtgccatctgccaatatgagtctttatcttcacatgtacacagttggatagagctttctctgttgacatgtcaccatcatgtggttcaaagagtggacacctacctgtgatgttcctgctccttgtaggcatagtgaggtaaatccagaggatagtgcacacaaaagatgtgtcacaaattgatttctgctgctgttaatttccagaaggaaagggctctacagaattgtgagtaccctagtagtttagcctgaagcaatacttcgcttcctgaggggaggggatgagatgactgttgcacttacgtatgcagactctggttccttcccacaggactgaagtgtgaaatgtgtaagaaacaaagagatgtaatagtctaatatacttcctggcttgaaggctaagagactaaaataatttatctggcttttattccatcccttagttgactctgtttttctgtcaagaatttaatcaggaacattgctgaaacatggttggctaagcctgggactctggattgatctggaatgacactgtctagtgtggtactgtgaaccacgtgtggttgtttaaatgtgaattaattaaaactgaatagaagtcagtcagctacatttttaatgcttgataaccacatgtaattactatgtgggactgtgccatcactgagcatggtcctgctgggcagcactgccctggaaattctcctccctcctgtaacttcctttccacttgggaaggaaataagcacctagcatcagaagaaggactgaactcttggtctcacttgtcatcaaaggacctcagggagcctatgtgacaaagtatggaaaaaagcttttaggaatgtgttatagtgatacatgaagaaatttgcaggtagttgtagggaataaaataggatacaaatagccaggcttggtggcacatgcctttaatcccagcactcaggaggcagaggcagacagatctctgtgagttcgaggccagcctggtctccagagtgagtgccaggataagctccaaagctacacagagaaaccctgtctcgaaaaatcaaacaaacaaaaaaaggatgcaaataatgtcatatgtattaatttatatattagttttagccatcttgcaaagtaataaattgcactgtgacattttcacatgtattatatgctttatacctcctccccactcttatgtatatatgtgtgtgtctgtgcatgcatgtgtgcacacgcatgcacgggtgtgtgcatacggttcaaagttgtaaaggcatttatctggccatttctcaactatgtaaataaagataatttctttcattcattgtttataccaggctacattattcttataattagctccaaatctttttataattaggaaagcaactttgtttttagaaagaaaaatgaacttgccaaaattgaaaatgagttggactaggaggaatgagtctccttgatcttctagatgcttcactttagataaaatgagatgaattttatgtctgcccctcccattcttggaagtgaaatgacttggaaagaaagaaagaaagaaagaaagaaagaaagaaagaaagaaagaaagaaagaaagaggggtggagtttgtaagtaactgtgatagctagccttttgtgtcagcttgtgtttttttctgtgcccccatccattgtcagtcctcaagggcaggtactgtcttccatctctttggtctctccagctgttcttgaaccagcagttgataaccattactaactaattgactgacagattggctgaccttgccatcactcttaggttttatgctcacaaaatgtgctaacattttgcctcattttgctttgggtctgagaagtcatactctttccaaatttgctgtttgaaaaccatccactggaatacaggaaccattcatcggaaaatgagttgggctttctctaggtttatatgtgtggcaagatcctaatggaaattttttttaaaaaaatcatgttagttttatggacagcagtaagaggagaaaatgttaaaaatctttgatttgacctgccgccaccaccatcatccagcaatgtattaatctattcaggctacctgaagcgggtagggtgtcattaatgaagagcatctccttccccaggttagctattagagtaattaaacatgcttgtagggacattccggttttgataggttctcaattcaatcacagtccccagacaggaatcatagtctcctttgctgtctccttcctcaggtcccagctgggatctaaagcccagaattctgggtgtattttcctgtgtctcaaaccttttaaacttatgcacatcacaacaccagaatacagatgtgacatttctgctccctctcagaaacaggagggaagatagggaaaagaatgaattagttttcacaaaaggccagtgagtatctctgtcgtggcacctgaatgattgatgttcctgtttgaagagccgtgggagttcagtgaaaaatgcctcctcttcttggaagggtaatgtcacactgaggagcgatacgaggggatttatgggtgacaaatttgaagggagccagcatggagctgtagatagcaaatgtctgttttcctcagtaaggagacatcacattccaatagagcatggtcatcatttcttcctgatgtacccatgctacctttatgactatggggacccaaagtcaagatctgtcaaagggaggacccagactgacagatccaatttctgcttctcaaaccacttagacttcttgttctggccctgctgaggtgaatgaagaagtcatggtacatactagctcacacagtgtctgggaaccgtagttcatatctcaatgagcccatgtgttcccttttcttcaatgtgtgatatgttctaagattacaatcattcagtcttaattccatactggggtttactgcctatagttacatttgtttattgaaggatatttgtttattggaggacatcttgcctttttgaaaatttaatttcccataatcaaatttaccttatttttgagagctgtattttcatggtgaagtgacgttgcttaacatgttgcctattttgcaaatacatacataaattatattattaaaatatagataacataattatatgctttgtaaatgttaacttgtattttgtatgatttttgtagtaactcagtgtgagattgtcactaccgctaaccccattttacaagttaagacactgagacaccaagactatgcagttgctatgtgttttagtgaggatttgaacccaggcaggtagactctacaatacttactacttaccattaaaatgtaggcagaaacagaataaaaagacaaccatagaaaaagtattttggccgggcggtggtggcacatgcctttaatcccagcactcaggaggcagaggcaggcgaatctctgtgagttcaagaccagcctggtctacaaaagctagttccaggacagcctccaaagtcatagagaaccctgtctcgaaaaaccaataataataataataataataataataaaataaaaatggaaaaaaaagaaaaagtattttgctgtgttcatcctatgtgtagactttacaatttgatgttttataaaataataatttggtttcttgccttttaaaaaatgagacaaaactgaatggtgttgttagggtgcttggtggcactgttttgagagctgctcagttctctcaccaggaaatgcacctttctgtgctctgacattctttgatgcctggccatttggcttgtggcttcatcatcattcatgttgcagtgactgtctcggcagaaggtgctcttcagaaagagtactcttaggattattgatcctcagatggaaaactcaagtccaagggaataaattcgtgggtatacttctagttaaaggtagtcagatcttgtccaaggatctgggcaatggaatctacttttgccagtgtctataaagctaagcaggtaccttcaatagtcacacttcaaccccaaggagtgatctatgccagtgtaatacataagactatgaaatgttattgttattttaaagtctatttcttggttggctagggggttgaccttcattctggtcagttatttgagtatttgagagttatctctgttgattttggcctgtctcatttaaaagcatgtaaagccattgggaatcgaaaccagaagtcattacttaatgtttctctctgcttagatacggaatttccatagataaattacaaaactataatgatgctctgatgatgctttgcctttcttttcccaaaccttacatgaatgttttctgtggattctatataacatgtactgttacccacttacaagtgactatactctagtgtgaatgtgcccagagtggaaatctgcatttgttctctgccttacatcatcagctcctagagggtgggatctgtgtctccactagtgggtaaacacatttttagtgatgtttacagcaaactgtagaacagccctcggccaaggtgagccaggtattttctaggtagcttaaggttccaaataagcaaggagaaggttgcgtttgtggtggggtgcatgtacccagtttccctgaatttaaaagagagctaaggagaaacaaatagcaccactcttcccgccttgggagagtctccacagagtgttccagtcttaagaggagaaggctgtaatggtggaagacattcaagaccagggttccaaagttgtgtgaactgggttctgtctcctccatcagtttgtcgtgtttgccaaggaatcctagggtacgtcctctagtaatcccctcactttccccattaaaaccagaatggtaatatcaataatgactgacatttctaaagcactttaaaacattataagcctgcttccttatccaataacccagtcggtctacacaatagccctgtgcggcagacaatggcactcacattttacagctgaggaaacacacaatggagagcagcctcagacagcagcagggcctcagctccccatcaatagagtgtggaatgaagattgcattattatgtttttaaaagcatattacacgctcagaaagtaatccactgatacacattgtcatgcagcaaagagagaaagggaagaagtaagggaggaatcgagcagggtgtggaggatcatagaaaaggaccatgtgggaatgcgagaaaaatgctagtgaataagagcagaaatggcggggagagaggaagtatgcttatcggtaggttggtggtgatatctttgggatgtcttcatttctttgtcatagtattgtcccccacttccagtttccccttttactgaaagaatcagaaacagtaatagtgaaatgggctccagtttatccagttgtgagatactaggaacctacttaaaaccgcaaggaagaccgaagtattggaaagctagagatggctctgtgctcgggattgttcatttgtatttatggtgggcatgcttaggggccttctgtggggttttggtcaaatgtggaaatgaactgaaatgcaggataaaggaagttaagatgcatgcaaatcccagtggaagggactaggatggcaacattgctccctaaaattgtcacaagccagcaagccttgaacgaagctcatccaaacacttgttttccaagacgtcccaggtactcgaagatgcaaagatgtcaaattagtttgactcggtgaggttcttcctgggtagggatggtttctgccctgaagtagctcattgctatacttgtatttcaggattttatggccagctgcagactttctgtcccccgcattaccctgattcccagagaactgtgccacccagcagctcctgcagtatggtgccttcctttgaggactgcctggtccccacgaccatgggtcaggccggttttgatgttttccatagagccttctcaacacactcaggcattacaggtgggtgtctgcgacctagccaagaagaaaagaagccgggtatatttcctgtggctggcagggaccatgtagaatccagtagaactacctctgagacagttctcatcttcaccttctgccctggctctcacccctttgcctacctgcacaggggccagcatttctcccctaggtggtggcagttccttccaatactcctccgcagttcaccttcttgctagaatatcctagtcatatcatcttacactctcttccctggcacagcattgagactcatgtgattttacttagtcaagttctccaatcctgcccgcacagactctcccttcattttccccctatcctggtgtatactcatattcctggtcccatgtgacccttctctgcctttaggtcaccctcatcccttcctaaaacccttttacttgagctgaaatcatattttatgttaaggcacatccatgcaagccagtcttttcccattctgtttatcagggacacacttagaaggccgaagccttagctccctccagcacctgtaggcagcgtgggtgtactgtgtagccatggggctgcacaatgcagggactggctgactgcctgtgttctttctcttccagtgtacgatttgccttcggcttcttcaagcctctttggggaacctcttcgcagtggccccgaagatcccacgttcttgcagctcagcgctgtggaccgctgtcctagccagctctcctccgtgtataccgaaggctgaaggctccccaagcctctcctgcatatccaggaccttggagtctctagtcacctctcattttcataccctcataagccttgtgaaggatgccaaccaaatccatggagccagtagagtcactgggtctctggaaggcagaactggatggtcggatctgacttttctggaatgcttgcacctcttccatcccccctcagtttgctgggccaggtgacaagcaggaatttcttttcaaagggaatttagagtctcactttaaagacacctgttacttcctggctgtcagctctggaaagaccaatgaatgtgcacaggactagatcgtgacccttgctaaagactccaaagacttaacgagaggaagactgcccaggttccagaggcagagtgtacagcctcacccatgctttccctcacggctgagtgatgtgcagccatgaatactgagggaaatccgtgttcaaagcaggtgtggcttggactctctgaaactctagctttaacattggtcttacatagcccatgctaactacttgcttcccagttgctcctccagtggcaaaaataaggttttatgtttggcagcctactttgtttttgaactttaaagacttgctttttacatctacttttaaaggaaaaatatttaaaggtttgttcttttggtataagtcattaccattttaatcaccccagctacatgtattttaccacagctgttgctctccctggcctaattttccagtctagcaaaggttatctgagggaaacagagtagttaacacatacacgcccctctctatctgccctcctttgctgtgtgtgatggtatatatctttaactccagcacttggaaggcattctgagtttgaaactagcctggtctacacagtgagttccaggtcagccagggctacatattgagaccatcttaaaataaataaataaataaccctcatgtattgatggttcagtgactccagattgaaaaccattccatttgaatggttcctacatttcctaatctctggtgctctgccctggacagaccaggaaacatgagagctgggacacgttgagtcatgtgcgtaggtttgttcagagaccaaaccaagggcacctgttgtgcagttcttttgtgtgcctctgcccagttctttacagggatccattcatctgtctgtctcctctgtagtgccctcctgttttcacctccttcctagctggatttcagacatgcctactatcaaattaaatcctgtcaattcttgggaaggttcacagaaggcagactcaagaaagcaactttttggaactctgctttgaaggcctggcctttttttcacaaagcacatagccattttatgttaagtctaaacaagacatcattttccagggacaacttttagaaaggtactaagaagatcctatgtcctagggcaaaggctatacaaataaaccagactccaaaaagctggtcaattccaacattctagtttgcttacatttcaggattttccccccttaaaaaaaaatgcttctttaacagaactgaagctaagttctttctggaactgaggccactgggactttaaatagttcagtgtcttgcgatctcgagacttataccccaatagacagacctttgagtctagcccccagtcaaaagagttccacctcactccatgctttgttccaagatgctacttggaacatggatagggtagataaacaaccaagtataggttctagtttcacagctcatcgtttgttctggagttgctgaagaaaccgtgttcttggtggaaactattgtgtagacatccaggtcacaagactttgaattctcttaggtcttctgatctttgaagatgaaagtacagcatgtcaggcttcctccacaggtgagcccttgggctgctggaaaccaccacccttgtagatctggtaggtcagtacacttgggctaagcaggaacacacatatgttaatactgacttacttgacaacaaccctcgtttgacctctgtcacactccaggaggaaaaggagaccctactctcacgataagcatcatcagttggtaaaccccaaagcatttgcaaggacctccaggcagatctcattggggtgataaggaaagaacaggtggaaggcagttgatcttttccactctaccttctggaattacttaagtaggaaagtcatagaaaggaacagaaacacagaccacaaatgacatctccccctgtggtggaaacgtgaggctctggagccaggctctggactcatggtggccttccacatggcatggccccttttcctggatcatctagaaggatctggtgtcatcaaggctttctgactaggtcatacatccaccccaagtcccacagtcagccccaagggatattcttgctgtcacaaagaagcatgcttggagccaggtccagtgcagcccccaaagccctctagtgtattcttgatagccactggtctgggggtcagagcctagtgacatggtacattcagggtccttcagtttgtacaaagtgtctatccttaggttccagaatttctccttaggttaaaaatgtgtccctcactttggcctacatggttgcatccttatttttaagcagcgaaactagaacttaaaaaacataaattattcccttccattcctaggcccttttagtcccttggtgggtagccattttcataaacatccaactggaaattgtcatttgcctttaaatgcaaaaatacaaacaaaacactaacatctagtgaaaacacatagcacaaatccaattatcctattacatgaaaaagatcattgcttcatccattgtcttaagtccctaaaaggactgtatcaaagtgtcacttgtcatttaccctctgatcagcacttaaaaactgtttcaatattccatggccctatgaggtatagtccagtatggtcggtctatgccacatggcccaggtgattctaaagtgaaaaataaaagtatgtgatagactacagcataacatctcctgataacaggtttggttatgttcagtcctaaagtcaactgtcaatagttcactactacaggcatggaacaaggctataacctgtcatagaactcctaccccttcctcgcccccgaatgcctggaagtattgacaatagcctctgtaatgttcagttttattatttggtgtttggtttgatttgactgtttagaacattgctgttattgccgtagataaagtaacagggaaagagaaaacccaaactcattgactaaaatggtgagtgtaaaaatgaagagatttattttgtacaaagaagtgtcctctgtaatattgctgacataaagcactttgggggggggggagtggaaatctgttttccatagatcacgcaggcccttgtacattgttctgtgtactcacgtagagaaatgtgctgcgtatatcatactggatacggggccggtttgactgtagacatacatctggtgctggttgtcgtaaatctttcaaggaattaggtacactttttttctattaatatgtatagttttgcgatttgtcacagttatgtttcatataatcataagttattttgtcttgtttcatgaagtccttttttttatgtcaaaagtaaaatgaagggattgtgtacttggcacagaataaaactggaaatagaggatgcccctcctgcctgaagcgctccttcagcgccgtcgctttaaaacacaatggcgaccagtgttgtttgtttgtttgttttattgttctgttttgttctgtcaccagcctcttctgtattggggatggtaattataattaaaagcagatgggaaggggggtgtccgaggccagctttaaaatgccgcgttgctttgggccagaactgaagcctggatttaattatagatatgaggacgaaatggcagtaaaaatgaatgtctccctgaatcctttacatgttgggagtgtccataaataaaacatgaagttttatttcatcacatttaattaaagcttttatacatgttttattggttattctattaatccacttcacaaactggataaatgtgtgcaagggctcggagtttatttgtgccttttcaatgtagcgctacatcacgcttcagcaatgcctctagagcttgccagcccaggtgctgggctttcagcatgccgcggtgggaggagtgcatttccagctccatagtcctaaaaccttctggggaagacccagcaccatcagctttcaagaatcagggtcagaatacctggtgctctgtgagaacagtggtccctgcaccccccaccctccacccccatgttctattcttagaaggccacctagtctcttgctataccgtgtttcctttaaaccagcgcttctcaacctgggaagttacaatatcctgcatatcagacatttatattatgattcataacagtagcaaaattactgttatgaagtagcaacaaaatcattttatggtagggggtcaccacatcatgagtattaaagggccgtggcattaggaaggctggggaccactgctctacacctatgcatcagtgagcatggtcaaggctggtttgacatgcaccagcctaccagccaaacacaggcacttacaagggtcaccatatcatctgggagggctggcacctgcctgcagtcccaacactcagaaggcaaaggcatggttgtgagtttgaggccatcctgggctacatagacttgtttgaaaatcaaaaggaaatgttccctccgaggagcatttgtccaaagactcaagagttatttcaagggaccctagacaatggctgcataccctgttgggttccttgaggtcagagagcaggcactgacaggatgaagggactccctggcttcctcaaacaacagctactgtagatgtgactttttccaacccccaagggaatggttggactgtaagtggaagagttggtggtaggtagatcccatgtctcaacaatgccatttctctgccaatagtctgaagtcaagaatacctcagatgcaagatgttcatcgcaccattcttcacaatagttgcaaactagaaatgactcaactactgactaataggaaaacaaaccaaggagccttgcattaatgttgtaatgaatgatataccacaaggggtgtgtgtgtgtgtgacaggactggggtcccacccagcagcctcatgaacccgatcaaaagaggcacggaagtgaccactcagtgtggctttattaatagctactttaaaacaagcaaaattcaattccacggtatggtttaggtggttgtgctgcaaagaaaaacaaggaaaatattaccacaaagcactaactctgggaaaggctcctgggacacagctgctgagagacagtgcttcatctctttgtccaagtgctagggtacccaggtgttggttttagaattattttactgtgcatatatattttatagtttttacttcagataacagagcaccaagtctttcatccccactcctggcctctgcagcctgcctctgcagaaagccagatggtgcatattttatatgtggagggctacctggtcccctttgcacctcctctgccaccatagttcaaagcgcctgcagacaatgtacagatacacaggcgtggcagtgttccttcccacgaaattttcctgatgaatgcaaatctgaaactccctccccctcgttttcagatattcttagtttttgaaatccaactatttcaaaaggattttatttttctttaaagcattcttaattcacacattgtataaaaacaagacacagtggtcagcaggatttagcctgagggccacagtgtactgaccctcaactgaaagagggtctccagcccatcccataaatacccactcaaagctattgataggagccactctaatagttcttctgctacctagggccctgctcctagaggggactcatgggttctgttgattgagctttaccctgtttagatcttgggttctgctcccctggatacagatgaatgctgggagcttggagtgccattcgactttatctctggatttaacgtttttaataaaagcaactgggcatacagaaatctgtgagaactggaaaatgactgcccattctttccaagctaaccaaatatttgctggatcttggcagccctagccaaccgttttcctctgaaatgctgagaggttataagtaatggatgccttcatttttctcaggccacagcgcttatgagaagctgcaactgcctcaaaactggcaggagaaagagggaaaggtcctggggagacgggggggggggggggaggaaggcagatgcaacctgatgatagaatgcatgttccgtactagtaagaccctgccttccatcagtaggaagccctgtagcagaggcaggtaagtgctgacagttgacatgctccagatagactaagagcagtgagcacctcaccccaccccaccccaccccaccccccagtgccctctgtttttgcataaagcctagctctctaattgcagagcatgggtccaatcgcagtaaatttacaagggcaaatgtggatgtttctttgtgtctctagactaggcaaaactggcactttacaaaactatggatcttggagtcatttgcttaatattagcttagactaaggccccattagcaggtttcctgctaggttcctgcacttgaatttgctgattgtgtgctgctgggattctagtatttgggggcaaaataactcagtttttagagttgaatgagaaatgtcatcaggggaaagttgacagaattgccagtcggctcaattacagaggaggaaacaggtaatttcacgcattcatgtgttcattgttttctgttttatttgtttgtttgagacaaggtttctctatgcagccctgactgtactggtgctcactctgtagaccaggctggcctcaaactcacagagatctgcctgcctgtgcctcccgagtgctgggattaaaagtgtgcgccaccagcacccggtttatgtgttcattccttcttttattgtatataaaatgagatcactcatcttcaaagaactaaggatcataagatcagccatagaaaatactgcccagggctttttttaatgcacattttatgggatcagcgggacccataactgcagtcagtaccctggacatacatgtcaataagggaggactccagagagttgttacctgaccaccacaggcccactgtgacactcccccacacaagcaaactcagtaaatgaaattaatataatattttaagtaatgggggaaatgtgcattttagaagcatcaaatatatagcacagagtagaaattctggcaagttgaaggcacccaaatgtttaataagttctccaggtggctgtttgtacaggccacagctgactgcctctgacacagtggaggcagggtacttaggagaaactgtggagagcttgcagaagagggggagctcgcagaagaggggccttgggaaagaagctgcagagtcagaattgcctatgagaagtagggggtgtgggagctagtcctgaatgggccttcaatgggagggaagtcactccacgtgctaactggagggatgagatagcccttgctctgctcagactcctggcccagagctgcagccctttccatagcggcctcagggcgcagtcatccctaccagcaggtggcacttaaccccttctctacaaaacaaggtcactatgtatgagaggatgggtcatggtcctttgacctgtctttactggaggaccactcaaagccttcacgacggtaaatgtgcactgtgactctcccagggagaatccagacagcacagtttgtaaaccgagaaagcaaccttttccccagaaagggactccttagtattatggaaaagtttagtggtccctttaaaaggtcaaacttgtcattacccagagactcaacactttcactcctaactaaaaacgattgataccagagactcagctgcagccatacacagcataggatggcctgatcaatagtgggcttcatgcccaaggatggtctcatgaggttcaaatgaaacttacagactcctattgcctagtgtgctgtagccagctgaggttgtagtacaagagttacccacctgtttgtggtgatgctgatggaaataaacccatcaaataacagcgtagagtcacttggcagcataattgtgcgtgataatagatgactgacttgcttacgtatttgccatacttcctattgttttagagtgtacactttttacttttttaaaacatgactgtaaatctgccatttctgtctgtggctgtgatctcttgactgcatcccaaggtgatgtggagtgactgatctttaccgtctaggtctgtgtaagtgcactgtgtgatgctggcacaaggacaaattcacctaactgcagttctcagaggatatcattgtcattagtggtgcacgactgtgtgtgtactaatggtcatgatagccttatccaaaaaaatacaaaaggggaaaatactctaaaacacctcacagcagatgggtaaatgaaacatgtcatagacagacaaaggaatactgtccagccttaaaactgaaggaaattaagatacacattaaaccatggtctcgcctcaaaggcattatgctaagtgatttcagacacaaaaggataaatgctgtagggggctttttctgggaaacacctggcatagtcgaatcagaaacagtagaatagcacttaccagacatgagggtaggagagcaatgaagagctactattcaacatgcacagaatttatatttgagaagatgaagatgttttgtgggcggataatgtatagcgtacaatgttatgaatgtgtacccactgaattgtatacttaaagtgcgaaattgatgtttttcactttaatacaatgatggtgtgggcagaacacttctacagatgcctgatacctggcagacaatacaattgtaaaagtgctttgtttggccatgttcttggggtgctctttggaaggatcccccgctctcagtgtgagtggaatttgagtcgttgttagagcagtagctgatcctggtaggtggaaatgtttcctgtaaatggtccctggctttctgagaaggagggtaagaagctggcaaagcaatgaatgggaaggtggtccagacagactgcacatggagtgttgttcctgctctgaatctttggtcctgagcgaggaaaaggatggaagatgggaaggagagaagtggatcttagtggtgcaagggagaagttggagaactagggaacattcaagcagcctttcttaaactcaactgatcccagtgtgagcaaggttagacatttgtttgtattccatccattcctgtaacaattgttttctgaacttcaggcccaacactatatgccagcctggagcaagtgataatgcagaaaaataaaatataaacatcagtggtcctggtgccatttccaagtggactgacttccaatggcttattctgcttgcccgtgaagtatgggagttttcaggaagtgggttcccctgcgatgcagatactgagacatggccagaagtgtaaaagattatggacatggtacactagagaaaggaatgatgcagaagctgaattgggcagaggggtgccatcagagtgtgatgccaattaagtctacaaaagctctgccagccactcaagatgttcccatacaaagattgctcctatcctgtagaagggttccatgctgtttataactaggttgaagggaaccctggaaagaggctgtttgtcatctccatcttgctgactcaatggctagggtcctcctgaaaagctgccaagcagaggaggacctgaaaaagaacagcatccaatcaaccatccacaccccaggcagctgaggaatctgatcaacttaacactgtgcccaccttgtagggcactgggggagagcagtgtccacacccctgtgttctccagtttgcagtagagaatattcttggcatacacgttggttctttagtgccaggacttaacccagggcttcacacatgcatggcaagtgtcctgctactgtctcatttccacccgtcaccatatgtttctaaagttattcctgcctcagcctctctgttctgtctccactgtcaaactttgtgggaacactctcagtccctgggatttcagaatctgagcagtttgtccagagactgccacagcagcatatgcctccatggggacaatggcaacactgtcctctgaaaatgaggagtacctcttttacttcttgggaggcatccagaaagggcgctggcttgggtgccaggcagagcttgttttctgatgcttgcatgcttttcagcccctgtagctctcaaactacactgatctgaacccatttcttatttagaggagacatagctcatctctccagcaatgagtacgtagattatcctacaaagacctcggtgtgcatcaaatgctctctaaaggtccattgccctcttttaaaactcactgatcctacaacccaagtggaatgatcacttatgggaagaccctggcaaacactagttctgacatcagaactctgaagtgttgaggaaatgagccaactgagtggacctgcacaaaaatcctccaacagtggtgccttcaaagtccaaagaagctctgctcacctcatggcacgcaagttcatctccagatcttttgcaccacccaaaaccacagcagcacctccagaaagagcaagaagtctcctgtgctaggtcatctgtgtcactgggctccacaggagccatcttccacactgccctttacagtgggacattcacatggtcaaaaggatgtgagacctgttttcctttcccttctgaactcactccaggtacctgcaaccctgagaaatcccgatccaaacagtcccgtgctacacccagggccagtactggcttcattctcaaatctatcatctccagagtagatcaagtctctagcatgtgcatcctgaggcctaaggagctgccaggaagtgggttatgtgtgagatcaaggatgggattggataggaatggggtgtctgtatgtagtaagtatcctcagggttgtaaatggcctgtgttggaaaacaacgatgatggttacaagcagaaagcccgcttctggctcttatgatgccactatgttctagccttgagttcaaaagatggtatcattgttcaaaagaaagcctggtgctctgccttggaattttgctgaaggcctgcttcctagactgtggcactgctggaaaatgatggaaccttagtaggtggggactattcagtggaagttaagtcatgcattgggatgccctcaaaagggaggtacaacctatgctggttgtatgtcagtttgagacaaactagagcaatctgagaaggaatctgagaaaaggtccatgagacaggactgcaagcaagcctgtagagcatcttcatcattattggttggtgcagaatggcccagcccattgtgggtggggccacccttgagcttgtgtcctgggttttataagaaagcaggctaagggagcaataagacaaaggttagtaagtagtgccccttgatggcctctcagctctgtctccaggttcttgccctgtttgagttcctgttctgacttccttcattgatggactgtggaaatgtaaatcaagccctttccttcccaagttatattggtcatggtgtttcatcatagcaatagaaaccccaactagaagagaaattggtcccagggttgctgcgacagaccctgtcctgttttttagaggattgtggaaggacttaagaacagaaaagctgaaaactcagtttggtgagttgttctgtaggatcttggaagataagaatgttgagagtagtgcaatgatagaggcctggcttgtgacatttcaaagggaagactctatggggccattggtgtgaaaaaaaaaatggtgtctgctcagctgcagctgaagaaccagctgtagttaacaagagaccagaaccactaatgtgaaacatttgctttgctgggacagtagatgctggtcagctgggagctgagaaattattggtgattaagaagagaacagcatcatcgaggtgagttcttcttagaagagtttccccggagtcagcacaaagaagctgtgttgggaaggttgtgcctccctctggcagctgaacttgatcatgtaagagcctcccaggtggtgctggttttgaaggcaaagagcagctgaggcttggcactgtgagagaccaggaaaggacagtggtgaaggtgcagcctcagtagcagttgaaggccaaagactgaaggggtaatggacaaaattgaggcttagacccatgaggagtgcccaggagaggctattggtgaaagtatagtccaattgcaacagaagaccccagcattctggagatgtcactaccataggatgactaccaagggcagcaacagccattgggtggagctggcctaagcctacaagacaagctgtgttttgcagtgggtggaggcagagacttgacccaagccctttggaggagcctgtaagacgcgagtagatcccagacactgagttatttacacagttggagtggttttgttttgatttggttgtgactgctgtttcttcctgcttgaaggaagaagtatttaacttattttttgttataggagctcacagctcacaatggagaaatgttagcttttcaaagtctttcaatttaaaaagcgcctggatattttaaagagactgggatgtctaagtgtttgaatttttaaaggctctgggactttttaacttggtaaagtattttatattgtgatgtctttattaatgtgtgatcttagggatgaacaagaaaggaaaggttgtggcttaacagtgatgtgtttgtgtatcaaggtgacaaggggtcacttatgctggctagttttatgttgacttgacacaggctagagtcattgaagaggttggagcctcaattgagaaaaagaatgctcccagaagacggggctgtagcaggctttagtttttccccctgaatgatcattactgtttatttttaactggggtcaaatacaattgaaataaagcagtttctgtgagtttccaaattagcctaatgatttattggtctccaaagatctttgaagatagttatcttggcacagagttctaaaccagagagccctctagatctggtatagacccatgtaggccctgtgtttgctacatcagtctctgtgagctcatatgagcctgttcaattggtttagtgggcctagtctcttggtgtccttcatcccctctgtctcccatactcctcttccagggggtttcctaaactctgaggggaggggtttgatggagagattgcatttagagatgtgtgttccaaagtttctctcttcataatatctggctgtctctatatttgttctcatctgctcaagaaggaagcttctctgatgacatcggaattaggcaacaatctatgagcatagcagaatatcattcggggtcattttgttatttttttaagaccagtagttgtaaaggaggatggtaagagagtccacaagagcctgaaatagaggaatatcggatatttatcagggagtcactcacaaatgataaatgataaataagttagaaaaccactgctgtcttctgcccggggtgctagaagctgcaatctgatctcagaccaccacccaagagagaaagcatgcctcttctccatgcttatcagtccacatatagcacctgagaaggggctgatacctcaaaagctattggctgaatgaactcccacaacaattgtcccttttgtctaaataagagggttctaaacctaatacaaaactatgcacaataaaaacatataccaagtattgtccaggagaaagaaaatgtaaaagaaacttaaacaatattacaactacaaccaacaagagcatcatcaagcaagaaacacacactaaatgtccaggctataggtaattggcaaaatataaagattatttcgacagctgtgctatcctgaagagtctaagtcttgtccctaaaatgtctatctaggacatgagaggaaagtagctgtgactatcaagtcttcaaccccatcaaagacctgagaaggaaagtaatattatctgagtaagcaaagtgcaagctggcaacttccaaaaggagcaagaaatgacagaaagagctggctgcctggacagtcacccaaagtctcacagtaacattggaacaaccaacttttgctaaggtctagaatatctgacacaccattttcaaaagcaggaagattcaaaagactaccctaccctgtcttggcaaggtttagcattcgcttttgcttgtatcttgcttgtccagtttggacagcgtgcctattgtcagcagtcaaggcaagggcagttctttgcccaataggccacttatgccaagaagagaacaagctccatatggagtgtctctggtgcccatcaatctcttgggggtagataagtgctgccaggttcagtggtgtctcatgtcaacagagttctaaattattaaaacatttaaatgccatgttatgtaggtctttgaagtgtttgaagatcacatatctatgtagagaacctgactaatataactaggtatgataagcatgggtgactatacatctcattttttaacatgcaattttcaataacatatatagcttactgactaaagctttacatataaaaaataagcaatctttaaacagatgtacagtataagaacaatgacctcaaaattaaatttcatatatatatatatatatatataatatatatatatatatatatcagaaatagaactgtatagtgcaatatgacaaaaaatccttaaattatatcaatatagaaaatatcttaagcatatgtagaaacatgcatacaatatgacaaaaataattttacattagtgtgcaaaaatggtgtgaacagaaagaggaatatacatactatgacaaatataatttcaagtttgtatcaatatacaatttataagacaggaatatgaaaataattttacataagtatcaacatacaaggatctatatcaatgtaaattgtctataactaacagttgctaaaatatttcacaagcagatacactaatcaacctattatcccatcccatctattcccctattttcttttccaaaagagattcctgaatctaaacttgattattccaccccaacccaattacaaattataaccaactcttaacaggtgataattatccacaaccctgtgaaaaatcaaaaataataataatagtaaataaataaactttcaacccaactgttgggggagagggtgtggttttcttagaaaaatcttacttctagagatcttgggggcaacagtttcactataggctcctgtaaaaaactaaaacaatggttaagtcttaagaggactagttgtaacatttgtagctagtcactgagtctgaagttctggctagagtgttataagaaggtggagcatctcagcctgctagtttggaattgtcttgagcagttttagtccaaagcctatccttgagttgtgtttattggctctaaggcatcataatgaaacaggtggaattgtttttgtaggaccccatctttctggagactttagagactgctgttaggaaaatgtattgttcatgtggaaaacttaaacattattaatatcaaaatggaaagtttaaatttttgtagatattcatccaaagaaaggtatcaataaagacagaaataagtatgggaagaagtagaattttggtgagaaacaaagttatgacaagcatagtccctagactttaggttttcttctgtcccacacacaccaggtagctcttctgatatgagacagaaactctgaatttttcttttaacaacatgcttggatctagagaagtagagccacactctgactccaaagccagctttgatttttaagtgagtcaggactaccactatactgaaaagtaaggaagcatagttgtttaggttgcagagaatattggtaccatgtcattttttttttttttttggcttggtgattctttctggatagctatcctttcttctttaggcgcctagatgtcagggtctttttactgcttgacattggatatatctattttcttgcaaagacaacaacagaaccctgccctgacctttgtgatgttttcttacaacttgtgggattatcactttggtggatgagctatcatttctctttatcaagaggtttctcctgttcaaacagaatcttcattaattttgatggtatccatggcttttcttttgctgtagaaacaaaagtgaaaccccatccccaatgtagcacatttcctgtttccattctgaggtcaacacattcttgatgtacaccggctgatttaactctgaagtttttcctattgcccaatgtctctctgaaacttctgttcttttctcattaccattaagaaaattcaaggttaataaaatattatgcaatctatctttgtgggtcttggttccccctgcctgtttataaagcatttcttttaaagtgccattagatctctcaacaactgcttgtcctgtaggattgtgtggtatacctgtaatattctttatgttataatattcaaaaaactgtttcatcttactggagacatatgctggaccattgtcagttttaatttgagcaattattcccacgatggccattgcttctaataggtatgtaattacagaatcagccctttcagagctcaaagcagttgcccattggaatcctgaaaatgtgtctattgtatggtatacgtattttaattttccaaattctgcaaaatgaaacacatccatttgccaaattttttgcatacctttagggtcacttccaacaggtaaaggagtttggttatagaaggaacaagtaggactttttgtttgtttatgatttccttggcttgttgccaattgatggaaaaatctttttttaaacctttgttattgacatggatttttaagaaattttgagacctctatcacactttctattaaaaattgattgatttcatcattaccttgttctagaggacctggcagacctgtatgtaattatttctattcctggttcttccctgtaattgtataaataatgcagttaattctgtttcatcagtaataaattcagcagtttcaatgtttaagactactgtctctgcatattgagagtcggtataccattagtaccatgggactgacatacagttctgactattgcatagaattataagggccctccaaagctattggctgaatgaatccccacaacaagtagtatttgtttttaccttatgtctctgggctgtccagtctctggttcttggtcacctaagcagtgttgagtatgggttccatctcatatataaggccctaagacaaatcagacattggttggttactcctacaagctttttgccttcattgccctagcatattttatagcaggacagattgtaggtcaaatgtcttatggctgagttggtgtttacattccttctttgatagcctgcagagtacctttgcatgccaaagacacttgaacattggagtgaaggttctatgtaggcaccagctctatctctccatgttcaatgagttgtgtggtattgtcttaagcaatggggccttgtcagttttttgaatgacagcctattgtcttgccaaccacctaagttgtttggggatttacatcggaccactttgactaacaattcaaaaagatataacccagtcccagtactggaaccttcttttggtgacaagagatgaccagttgtggtctggtcgtcctcattatttggagaattcattaggatgagtaaggcattttcttaataagtgattgatgtgggaggctggggagggccacccattaggtggtggtcctgggttctataaggcagaaggatgtttgagctttggtcctgacttccttcagtgatagactatgatatagaagaataagctatataagcctgtccctcccacacgttgctttggccatgatgttaatcacagcagtagaaaccctaagacaggacccatgctctatctcttttctctttgcttcctgccactatgagatgattagctttgtccctcatttaccacccctcccccaccccccacacaatgttccccttcaccacagcccccccaaaacaatagagccacccgaccacaccctgaaaacatggaaattatgggccaagataagatcttccctctgtaagacattctctcaggtgtttttcacagtgatgaaatctgagtatagcacccagccttacagggtatttgtaaagtatatttattaagattagacatatttttatttaatatgtttgaatagcttgatttgcattcttttaagttgcaaacttgatcgatgtgatttatttatttatttatttatttatttatttatttcgagacagggtttctccgtgtaactttgtaggcctggctggcctcaaactcacagagatctgcctgcctctgcctcccaagtgctgggattaaaggcatgcaccaccaatgcccaatttacctcaggttttataaataatagcaagcttgggataagccttagggccctagactcatcaactcctaataacaggaggcaaatgtggtacagattctaaagtctacaaaaaatccactaaggaattgttaagagcgctcaaataccttgacagttgccagacaaccaatggcatgctgtgaatatttgctgtagtctaatagttcttcaggtaaaacctgtaatgttatttgtaattcaaggcctttctgatttgttagtaccttaccatcagcagtgaacatctgtagactacatccatgtacaaggtacccggaacatgtgtgtaagtcagtctttttgttttctgtgcataaatggagttcttaattggtctaaataataaaacccagagtcagatatagaggatgctgagagatcagagagaagaaggagcaagccacagccacctttagctcattatgttcccacagaaaagagagtgaattcctgtttcttcccacttatatcatctctctgcccagccatcacacttcctgtctgtctgtacagacctccagacctgtatggatagctagtggcaagctccattctctcctcttcagacaagctttatttgtacaagcaagatatcaccacacctgtgtatctaccacaaacatgcaactgaagagttcttttcaggaacatcccttccccatactgcaaatgggcatggcatggcgtgttaaactagctgtctctctgggagtctgtgggacatatttgtgtgactcagccacactgctgggccttctatcattaacttcaaatcccctctcttcatgattcttctgccgtcttctgctcacattttcaaagggccagattctcatctctgggcagtttatatatgaggccaacagcccacagtggatgagaaccatttgtgctccaggcctgtggggctagctgagagattcagagctctatcactgcacagtgtgcaatccaggtgcctccttggagtagccacgttatggctataaaatagatctgtggtcctgttccttattttgtacctgttccttctgggaattcgcctttgttaaagcatgctcacaatgagctatcactgcaaacacttgctaacagcttccaacggaggcaaggttcattggctccattctccattttgcaggagatcttaggtgaactggctgggcctagatcttaggcctagactcaaaaggcctatgagcactgcaccacagaaactactaggacagggcagtgtggtgagatgtgaacagtgctggtctgggaggccagagactgggctctagttgggtgactgccaccaggtcatttgtgacagaagcttcagctccagagtgagatgacctcagaattcatccatctccatataagcaaattacttacccactgagaaccgcaggcactctgctcagggagggttataccctaactttcttagtgggctctataaccaccacccagttgcttcttagtaaatagtgactttcgttccacagctgtaaaactcaaagacagttggagtagatgatgtatgctgctcagacatacgggtattcctgttaccattttgacttccagtctcagtgtttcctatgggatccgtggtttatttccccactgggctcttttcctcctcagtccaactgttttcatggaagagttcatatgaaatatgccacttacctttcttagccaccagggactttgtagccagttaacctggcagtcggtactgtgactcaccaagatgatgggagcagcctgtgattgcttgtcctctctactgccttctcacaggtggttggaggggagttctgaagtctgaagacatgccatctggagcccaggaacctctggagcccagtcctgcaagcaggggagcctgcagccaccgtgggtggtgcccaaacctaccctcctagacacatgaccccagatatgcactttaggacagtgttacaagtggagtaactgggggaagagccaagctgacagaatatgaaagagaaattctgcacgccaggctaaaagtggttctggtttctaagacacacaagccaacttgcccttgcctgtgttgagaagagagttaatgagaagacacactgaaaatgtggcgagtaatcagaaatggagctgaaaagccactcgatgcattcagatccccgggctcactctcttcgagtcttccttcctcttcttgctctcatctctccttgtgttgcttgtttccagtcttctctccccacggacttacctctcctgcttgtctggtctacatatctggcaaatgatgcccattctgtggtcccagggttaactaatataaaagaaagaatcaaccagctgttcactgtaaatacatgtacatgtatgttgtagaattagatgcatacatggacatgtagacgaagacataagtttagatagacaccatatctgcctgaacttcaaatccacaatgaaaggactctgtggcatctgacttacccaggtagccagccatagactaaccacccctcagcagcccctagtatcttagctaacagggttctccagggtgagagagaggaatcagggtgtctgtgagcctgggatgcatcctaagttatctccagtagccttgggagtcgggatcctcagagaagcagaatcatgaccctatggaggtaggaatgccacatgtagtatagaatgccacatagatcatgacctagctggcaggactcttatcaaccctgactagcctgggctgtcattgaaaacttgttactgggtccttatccttattttgctgtttgtatgctgttcagagaggcagtaactcagagctgagtcattatctgtgagatttccccaaaggccgcctacatggtgcagcagctcacccctggagcaggagtgcactcttggcatggctgtgttcctttgcattatctttggagaatcatcatattggggaattccagggtgggcctgataatacttaagtgtcaagggtgagagccacaaatatgccatttgtttgcattgccccaattgtattacctgttctttattataaatgtttctgactagataactacctctttttccacttattaacatctcaggaattttgcacggtctttccaatgagctttcaaattcccatctatcaaatttatctcgtccaacagcattccattaagctgatccttatttctgaaaatgtagagtgtcattgtaaattttactcttatgagtcccacaagttcttaggtttattcagagacaaattgtccccttaatcattattaacttttctggtgagtcaaaaaagaaatcacatcataaaattttcccataatgaactgtagtagcaaattcttatctactgcagtcattcttaacctgtggggcacgacccctttaataatgaataccagatatttacaatacgattcataaccatcaaaattacatatttgaagaagcaatgaaataattttatgtttgggggtcaccatagcaggaggagctgtattgggtcacagcattaggaaggttgagaaccgccaatctgctataacacagtggcaagaagaacacatagcgtcaatgcttctatttgatatggtgctgccaacactacacagcacagaggacacaaaggctccctccctgacttgacaggtgattcctatgggctgctgggtcctcgtatcaaaagcaaatctgcagaaatgtaaaataagagggaaatgtggattatggaaatagtgaagccatccgaaaccccaaggaactctggagaattataaagtccatgtcaaaccagcaacataaggaatgtgagcccctgtgggaggaaggttaccaaggccctgcggaaggatcaccatgtgtgatgaagcagttatgactccaggctggctgttgcttgtcactttgcatttctctagggctaagcttgcctgtgtttttaatccagaaaccagctgctaatgttacttttccagtgctaggccatagacaagtgatagagcagtcccattaggatgagaagtgatgaagacgacagaggaaccagttggccagatttcttcacatctctacctgactcctacctaaacatcttcagggaagcctcaggaagctaaacacaggtcagggttgttatttctttctggactgtttagacttacagatttaaaattcccttggggaagttgtttggtaaaatgacaaagaaccgtaagtctgaggaagactagggtagtcactgccaagtgcagtcaatggctcccatataggggcaggaactctcttgtgctaaaataaccagactcctgtgtagtaccacaaactgacacacaccatttgaaatgaaaccttagaacagggaaaacaagttttaaacaaagctagctaagatatttacggacacaaggaaagaaattacccatatggaacaataacaaaacattaatgaaaataatgatgtgaaaacattagctatggaaaatgtcatgcttcataaaagatacagaaagatgggtgaaaccagaaaaaaaaacattgttactaaaattgaagattgcattgggaactcagagaagaagaaagtataaaagaaacatgaaaagaactgtatcttaataataaaaacaccaacatgcacaatctagacctcacccttcctactgctgtgaccctttaatacagttcctcttgctgtgctgaccccaaccatatgactaaaaaataaaaatacatctgtttttttctccaggaaaccatctgaagcacaaatgagcatcaacagccccagccttctggatggcgacagtgcaggcaaaagtactaacctgggcatcacattgtggggggattgggaaagaagggagagaatcaaaaagcatgatgggagttatgacaactgggaaatactaagaaagcctctagaagtgtatcctaaaatagcaattattgcagtagatatagatgcattaaatctactacttcaaagcagagattctctcagaatagattaattaaaagagacttccactatatgggtctcagtggaatcacggaaaataaaaagacttaaatagacacaaaatatggcaataaaaaaataccaaataagggtgggagagagaacttttgttggaatgtaaaaagaattaaaaaaataaatcaattatcaaataaaagctgatgcagcaatcctagttttaattaggtatcatttatgatatataatgggacaaataatgccttatatacaagtataagaaactaataaatgagatatgtttgtcataatatacttgcataaatattgcagatttaaaatatgccaagtcacaactgatgacactgaagcaagacaagccaagtaatgttagctgcagattttagaattccacttagagaaactaaaattgatagatggagcagaaaacaggaactatttaccaaagatgcattaaaataagcaagctggtgccggggcacccaagatcatatgcatacaagcatagatttcatggtttttccagaggataaacataagccttgatgataaccacttggcttggcagattcaggaagtcttaaaccaatggaaacttcctataccaagttctttgacagtggccagggatggggaaagtttggaaattatgcttttcatttctccacaatttcatatgaaagtgacagagtcccccattcttgtaccactggttacagaattaatggcactgtaaattaagaacatgtcaaactcaatagaatgggtgtttgtaagagaaaggaaaatagaattagagtatgcagaagagaatatataaatcaataaataaaggaccaaaggtcaataataaagtatgctacaaacgagagaatatagctgattctgccctctgtaggtggacggtggtagttgactctgccctctgtaggtggacggtggtagttgactctgccctctgcaggtggatggtggtagttgactttaccctctgcaggtagataaagtagttggtgctgccctctgcaggtggacagtggtagttgttttgaggtatagagcttgacttagaaaagatgaacacgtttctttgcaatgatattatcaacttcagaaagaaaaaataacctaaaagaatatgttcagaaattattagaattaaaaacacatggaagttattagaataaatgtttcatatgaagtccactgataaaaaatcaatgtaaataaatttgttacattgcactagccggcacataggtagaaaatacatttcagagggctggagagatggctcagaggttaagaacactggctgctcttccagaggcctgtgttcaattttcagcaaccacatggtggctcacaaccatctataatgagatctggtgccctcttctggagtgcaggaaagcatacactgtacacatgataaataaataagaaaaaatatttcagaaaggatccttttcactggcatttttaaacaatatgaggggcctaggaatacttttgatttgactcagtgtggaaagattttaatggagaaatgatacaattttcttccaggtgactaaaaaaagtctaaatacctggaaataaatggtatctctcatgagttagatggcttgtcctctattatcacaaaattgagctctatcttcagcacaacctgaattttaaaatcccaacaaatcttgtaggtgcacatgggagaaggggcttcgttgactccatcatgaagtcttgaaaaggggagaaaaaaaggaaagaagcagaaaggaggaagaagacagaaaaagggtcaagggggaaatgaagagaaaaagactaatgagaagaaaggagtcagtgggggctgtgatttgtcaccttcttgaatagtaagagttattacaatataatgtgctctgttcacagaaaagaaaggaacagagccaagaaacagactcacacacgtgtggaaggaatctatatcacatgggctcagtgcagacaagatgacattaaatgttgctatgatgggaccgtcatcttcccaaaggttcagcatttcagactttaccctgacccctttggagtctttgatctgtttagaggtgacttttgtacagggatagatatggatctaacttcattcttctacatgtggacatccagttttcccagaaccatttgttaagatgccatctttcctctactatgtattttttggctttcttgtcagtcatctgatagataattgtacactcatatttggatcttctatttcattccaccagtctacatgtctattatttttctgtttttatgccaataccatgctgttttttattattatagctctataatatagcttgaaatctggtgtggtaaccccccccccaactcttcctcagcattcttctttttgctaagaatgcctttggctatctgggatcttttgtgcttcattgtgaattttaggatgtttctttctatttctatgaagaatgagatgggatttttttttaattgggatttcattaagtctgtacattgcttttagttctatggtcattttcacaatattaattctaccaatttatgaaagtggaggtttgttttttttaaccttatgttttcttcattctctttccttggagatttaaagtttcctgaagagagctttctctgccttggttagcttatatgtatatatgaggctactgtgaaggggggtggttctccgagccttctttctcagcatgcttgctatacataatatagaaaagttattgatttctcatgccacaaaataaaaattatgactctcagcagcagttaaataggaaagtagaaacctttttatggagaataatcttgtgatactgaactatacttaaacaaaatcaaatagcatgaaccacagagaagagagagctgagttcactcaatataataatatacatattccagatgcttgaagaaaataaagagagaaactacaaatgtgaagaaattattcacaggatatgagactaacaaaaataattgcatctagagtaaataagacataagaaaatactacatgtgagggttgggagaaatttttaatagaccccctagaagaagaaactcaaatgggcagggaacttctagaaggctattcaggctaattgtgaatcattccgatgtaaaagtacatcaacatgagagaattttaactatatcacatggacaaagcattttaaaggccatactatcaaactggtgaggagacaagcaaaccaggacacttgtactttgttaataggtacaaattacccataaaattaatgttcatgcacatagccaatcagcatttcttctcactttgtatcctagagcaattcttacatgtgaccaaaagtcaaagaagacttggagccacatcataaggattgaaaatatgagaagcaagccatggattacagccatcaaaactgatatgtgaatatctcatatgttcacatatgtaagacatatgtaacttcacacaaaggaaccctgctatgcaataacagggtatgagttatggctgaatgcaacagaactaattctcaggatatactgactttaaaaaagcaagttgcaaacagtcttaactgtaatcccactcaaggagagagatgtggaaaaaataaaatgtaggctaattgacatgttgtgaagatcaaaaagaatccagggactctaatatactacaaaagtaaatactggcaatgttttatttctgtgagttgaataatagatagataaaaaggatcagtggtagtgtttgtaaaatatgaatatatgcctaacagtttaattttttccactcagtttttttttaaagattttcaatatggtatcaatggggaaagacctttgctgggtatactgttactattttctaggactgtctctggagacatgttctgtttgggacagttttgcagctttgcctaggtcttttacattttcaaatcctcagtcattcagaatccaccatactgccagccacctagtcattcccaaattacacagagtgggaacacaattgtttagcatacatgctcttccttctgcatgtagtagaatttccatcactcatggaaatacttactacagagagcaccctgggtggtctgggtgtggttaattctgcattctgagaagcctcttgtccctggtcatactcaacaggccattccaaacccaagtcattgtttcccccatcacagccccttctgctgcaaaacctacctgtagatgcacccacacacttcatatttcagccttctcttctgcttcccatttgctataatctgtccctgaaattgtcaatggcttcttcttaaaagggcacattgcaaagcccttcctattcttgtcaacatgttttcatcagcttttttttttctctcccattaaagatagattcctatagcttggaaaagttcaaatcaaagatcatgtattcaacatggccaagtaaaagtgatctttcttcagtcccatatgtgtcaatggggaaggagagacacttcattgttatatgatggggttacacaggatttccatgggaccacatttctctacataatccccaacaaggttccctaacttgggaattttttgtcaaagaggaaatgggctttttaaggctgtgtctacagcctctgatgattctgagaaatcagtcacatacaaacacacatgtcagcaaataacaaaggagattacttatatcttatcttctccctactaagaaacaagaagcttctctaccagggagccaaggggacagcttctctgaggagttgactccatatgtttggagtcctgtaggcttgggtgtactgtgatgtcccctttttgagtcagatgctgtctcttgtctctgcatttatccaaaacaaaaatgctaagaaatcagtctttctctggtgattatttggtgttcccttccaatgttgtggttgaacccagggcatcatacatactatggaaatactccaccactaaccatatccccaaccctttatttgaagatcttagtggaagtttgttgttcccttgaacagatctccaaattctggctttatctacatgatgctgtagtagccaaccactccatttagaacactttggtttatattttggtggtagcagtctaggtggggcttcattccttcaaggacagtgaaaggacagtcatcggttagggtgttctgagtattttgcttagaaagcctaatgggacaccactgtgtgaccattggaccaaagtcctacaattattagctccatacctagagcacacagtgtctgcacatagctctgggctcccttctccgggcagttgctctattccttctccttttccaaggaatacctgacaaactgccttaggaagaaaaactggggagataatttgagagagaggaaactttgctgccagcacattaggtgacaatctgtgtcaccttttgtgtttaaatcgagtggagaatcctcactagactgaaggaggatgtgtgacattgctcctgtcatatcctggacttggttttttttttttccttaagagaaagtagtttggcaattattgtccactggtggattaagagctaaaatgaatggtaaataggaggctgcatgcctcactacaattcacagatagtcatttaacttgtactttattcctccaggggaaagcatagacctctggcaaatgccctttctgctctcatttatttaataactgctatttaaaagttgggaacaaattgtgtgtgtgtgtgtgtgtgtgtgtgtgtgtgtgtgtgtgtgtgtgtgtgtagcggtgctgggaaagagccaaggaaagaaattttaatagggaaaacattttctactgattaatttctcaaaatttgtgtgatgcacatatgcggtgggggaggaaacacaactaaatgcaatctgggacacctcccttagcggttaagctttgcacacacacaggcacactgtgagggatttgactcaaaattcttgtggtcttgaagccagaggtcaaaaattggccttgtgtggatgtgaagtctgaattaggtgtctgggtagttatgaaactttaatagattcttcagctatatgaggatctgagacataccttcccattcaggaggcagggggaagagccagccattcttcactcccaacaatctcccatgtaatggtgaagctgctaatctgggcccccactctagaaacaaaggaaaaaacaaattccattgggatcaagatgggtcaggccaacctgcatgagctgcagagatatttaggccataaccacagaggaactatctccttgggtaccccagctaagaccatcacttacttcttagtgaggaggacatggagacaaatgtattcccttttgtgtatgcttccatctgattggtccactgctcacagtccaaaatgttctggaatttctttaaacccatagtatcttgaaaccccttctacttttgccttaatacaacaacagacagatatgcttagcaatctctgtacatattaatgtatacatacaccaaaagaacgtaaacactttctctccttaagacaaatgctacccaaagggatattaaccagtttattatgtaacatggaagtatggaggatgtttttcatttatttctatatccacagtatttgatagcctgggcattctgagcccactctgtatgatttggttcatccatgtctgtgctttccttctgctttgggtagatagttgcacatcagagatctagactcaggaacctaaagcaaaaatgatcagacacagcaaccctatcctaatactcctcttccttctgatatctttgatcaacacgggagtttttcctactctggtctctgtggtagatgtgagtcattctgccctgtgtaggtctttggacacctccaccctgggaattacagctaattgccatcttccgaacataactatcttgagcattccttggcaaaactttgtgatttatcttatattatatgtcctgagcacaccccagtgtttggaatagaaaaggtattcagtgggctttgatgaattaaaccaaactgaattgaactgcagttcaacaaaattatttccatgctctttagacaaagtgggagtggtagcttctgagataagagtgggatgggaatagatttggactatagggaaaatcacttgtatagggaggtgtctgagaggtgtagatgaggtgggtgggtcttagagaaatgtatgcaggagacagacctttggagaccatgaagtcctagcaagttcactaaactatattctctgacctctggagaaacacaaaccaagttgtaggtccatgagtaatatgatcttattcggtctggacaagcactggaagccacagaaaaggaagactggagtagattgagacaagaggtgctattctagtttgcttcctgttgctgtgatgaagaccatgaccaccagcaatttatggaggaaagagtgtatctcattttacagcttactgcctatcattgaggggaatcgggcaggaactcaaggcagaaacctgaaggcaagaactgaagcagagcccattgagtgatgctgtttactggcatgctctcaggctcagattcagccacctttcttacatcttccaggaccacctgcccaggcatggcaccgcccacctcccacatcaatcaagaaaatgccctatagacttgtctacaggatgatctgatggagattttttttccagttgaggtttcctcttcccagattaccttagcttgtgtcaagctgacaaagcaaacaacaaacaaacctaaccagcttggatttggatttagtagtcaaggcctttggaagtttggaaagataatgtttaatggatccaggtaggtatgcaaaaacatgagaaatttattttgtgttaaaagtctgtaaattaagaatctgggggtggccattttggcaatattgtatttcccatcagcctacttggtttcacttcctgcctttcatgaaatatatgtatagtgaaagcaggcgactccccactgggttctgcatttgtacgcatctgctgtccaatttacaacttgcaaaggaggtgttaattagttggcagaagcacctgagcagggagtgctgggttggctgagggggtgggaaggtctctggcatttcctcattcacataagcaggagaaaggaagaaaggaaactcacataggcatccaaaatggcaacctccaagccaaggcaagtggtgtaattataacaggtacctggttcctccaaagaggggttatttctagattcatgtgattaataaccagtaatgtcaaatgttcatagagttcactccaagtttcatctctgtatctactctctacatcgtaaagatctttcaaagaaacttgggtgagagttttgctattgagtagagtaagattaatattgaagactaatctctgaagtagaaagggctgagagcacccttcacgggggaagggcagtggtccagatgcaggagagtctaggaagtacccctttggaggggaagtcacaaatccaggtggagctcaaagcacttttcattcgttctcaataaaaagaaattggctcagtcaaaatagatgcaagtatttgttggaggaaaatcaaggctaaataaagaacaactccagctttcttcatctcacatgtcaaactctacccaatctctattaccccacacgtgcaaaatagttgagacaacatgaggacaggatggtatatagaaagacctgatgagcttagagatgcagaggtgtagagcaggatgggagattcccaagaacactggtggtggaaacatagcttgggccctcagttccagtcttcccactgacattatcaacataccatactatcccaaagctggtccgggcacatctgggccttcctccgccagatctgatccagcaaaaacactctccataagacaagagatggctagacctaatacatgaagaccctaatataaacaggactagagagaaagacacgggcacatctcattatgcagtcctctagtgcccacaccccaaaagaaatcaatcttaaaaagtcagcaacaagtgagtgaacttgcagtttgttgataaacattgtctgtgccgatagagcagaagaaattgtttttaaaaattcagagatgctcaagttacctatagaaggaatgcggttgaagagatcgatacgcagtccataaggctaaggtttctttattcaaataaacgcaagccaaagcgtgccaggggcggccaggaagccaggccagagagaaggtagaagggagaagggagaaggggctatccacgtgtgcttggtcccttaagaagccttcccacgacctttagacttcctctgaccacgccctcatggggcgtgtcccggcacacctgtctgggctactaggaggcggggctacagtgtctccctacatgcagtgcttattatctactttgaaaaatgtcagtctgtctttgtaaaaaactacagcttgcaccgaagtaatccagaaaggagaacgtggcatagattgggctttctgcacactcagcaagcactccttcaggctgctaaggtaccaggtccctgaacaaagacagaagagactttttgcttccaaccctggaatggccgcacctggctcccgatgaagttcctgtgcctgaacgtaaaaacccagcatagaggaactgcagccaagaacacaaacaaggacagggcccctttggaagataagaagagggccctcaatgctgctgctactgcttggagcagatcctaagatgcccaagagaatacaaaagcacaatgatttacccgaacatacactgaagggggcgtctaatggaggtatgtaattagtaggagcaattaagacgggccagagggtcaaaaggtagaatgcaatactaggttgcttgaatggcaattgtgggaggggccctgctaaggactcttctgaacagtgtggtttcaggctctgtgctcaaaagcttgaggacagaggtcagaaactcaagggggattttcttgctaatgttatcaaatatttttactgtgaattatttcatacccctagttctcaggacactctgactcatggtggattttccataatgtttactaatgaggaaataaagagaaatgaaatggtgaaggcatctcacacacttcctgtccatctccatcacctgcacagacgatggggtttgagcagaggtggggagttcaataacttcagttaaatacaaagcctgtctagcattttgtagtagagctacacaccttgtgaaacccagtgaaggcaaatccaggtggcctttgctttatttaagtataccatcagatataatagaaagctaggaagggtctcctgccacctctatggaccccatctgaactgcagacatctggttccaatgaaaaatctaccacacattactatgcagccttaaaaaaaaaaaggctttctgatcattgtgagtcttggtttgctcatctgcaaaatggacttcactcaggctcacttgtagtgattaaatgagataatgttcccaactggctgtcatgaacaacctgaggcaataggccagtaagttcatttaacccaaatgtgtgttttggaaccagtttatcttggatggctcaccaggaaattttatggctaaaaattagacattcaaaagctgggagatttattgggatttttttatggccaaggtgggtgtttggcagtgcttgcttttacaggtttctaattaaaattattttaggttggcattatagtgttcaactttggggctattcatccatttggaggaagtgtttctaatctcctccttttcgtactttttaatgtgataaaatacacatcaagtaactgaccactttaaccatttctaaggacacaatgaagtggcattgttcaagcaccactgctcatttttcagaactttccatctcccctaatggaaacgtcttggttctgtcctccccgagtcccaggcaactacttctctatctcactaaatatgactagcctgtgatcctcatgaaagccacacaatgtttgtctgagttattttatgtgatgatatcggtaaggtgcatccattacaccatgtgtcagaatctgtttctttttaaaaagctgaatagtactctggtatagaaaccaatcttgaattgactggtcagcggacactttgtttctgctcttttgtgattctataaggctactacaaaaatagctgtatagccttatttactctttaagaaaatgatttggcacagttcacaggccacagatgcaagactctgctgatgcacctctgacaatagctaggagggtttttttccctttcaagcatgtcaccttcttgggttcttattatctcataaaagatgtagaagcatatgaatttgcaattaagaacaacaacaacaaaaccccaaaatatcaagtaactgtacacgatgtagttgtgagacctactcttcgttgcaacacagtaccctcaaaagcccattggagccatgtttattatctgagggctgcttggaagtccattctctcagtctagctttgctttagccaggcccccgtggagcatagcaattggcacattcacattgaatggtatttattacagggctacactaagtgtttaggaaagtgtgttagatttatctacataaataacatctacctcttcacactgtaccatagaagaaatttttctttggtcttaacattagctatgccttcctgcagggggggggaggagaggagggggtggtggtgaagggggcacacaaggaccagcttgtttcttcttggagtgcagaggtatggaacaatgtgtgctctggtcactaagaggtttcagtacagggttgatacccatctgtagcaaaaggcatgggagtatacaacatgaattttatacatttctttacagaagcttccccttggtatggtttgctcacttaatcattgttgcagatatgtgtatatgaaaatgggtggagatgggggcagggagagaggaagggagagaaaggtttttggtttttttttttttaaatagctgagagggtggaaagatatatataattcaaagtttatgcctgaaaacaacggaaactaattctgatgaactttaccacaacttaattaattaatttaaaaagaatttatgggaaagctattagcttagctcagaggattattgggaagggtggagaacagggctcaaattggggccatatcccccaagaagctgctctgttggcactgcaagagcccaaggagaggagaagtccatagtggcttggcctgcttgcctgaggctgagtcattactctcccctgcccagaactcaaagaaacccccaactcccctggggccccaatgggccatggtggcatcaactcctgtgaaataaattcacgtttagaatctatgtagccctacacagtaaatatccactgcagagagacaagaaggaagaagaggagggggagggtaatttcagagccagaaagagttggccttatttctgctgaagatggatggttggcagagaaataattcagaaattaaagccatacataactgtcatacataactgcccagagaagaatgccatttatagagaaattgtagcattaaaggtttgtgtgttctcagagctgattatgacagaacacgaaagagtgctgagatgctaaaccactgagtggccggctgaccttttaactttccctcagcactgtcatccagctctcaatgaacccttatctacttttctcccctaaaagtaaaacataagggaatgatcagccaccttctgcctttctggttaaaagtttgggtcagagacaggcaggagccatctgtctgtagccattttgtttctaagtgtcaccttaagtctcctgcaatagaaagctgaggcacttgtgcccaggatgagggagaccttgaaacctgtgtcaaccaaatgagaaagaaggcatgggaagagaggagagagggttgggagaggggagagaaggccttctggggtcatcaaggaagagagctctttgaaccccattgttccttgggaaccctacattcatagctgtctcttctgtctacaggccctggtgtggtgatcaggctgtgttctgcctctgttactccatgttatacaaaacagtgatttttttttctgactgtgttttgtccccagatattccattttacgggcaatatttttatttcatttttaaaaaagatatatttgtatttgtgtgtgtgtctttttgtctgtctgtctctctctgtattattgtctgccatatatgttcaagttcttgaggaggccagaagaggaccttagctggcagctgtagcagcttcttgtcatcctctccaaaccttcccctcagagggctctcacccctcaatctgctctcctgtcactcaaccctcggaagccccttgaaatctgcggtggcatcttaaccactattacagatagtctgtaaggcacacacagaggcgctgctatgtgatatgtaatgaagaatctcagctaatactactaggattaatattagcaatgaagaatggaataaaagaaccagtgtttgccttggccagagctgtcaaggaaagtgggaatatttctggcaaattgctgccaaagaaaccacctttgtgaattcttgttatccaataaattctgatactgtggaaagacacagatgtgttcatccatgtttctggctgagtaagcctcaaaggatgtcctgacttcacctgtggatttccatacaagggtaggatgcactgacactctgccttgtattttgggtggccctcttgctccttttaaatgccctttagatgaacacattggaagagtgataacaaattattgttgtcagtgtgtgtttcccttgtatgggataatcccttgggtaatccaaactatgtttgcattaaggagaactaatatctggacccaaaaagctgaacaccctgccatgatggctggggtgatgaacttcatccagcttgagccatctatttctatagaagtggatggtgggattttttttttttttttttttttttttttttggttttttgagacagggtttctctgtgtctccagatttctctctggaggctgtcctggaactagctcttgtagaccaggctgttctcaaactcacagagatctgcctgcctctgcctcccgagtgctgggattaaaggcatgtgccaccactgccctgctgatggtgggatttttgaataaaagccacaatcatcaagtacttaccatgtgtcagggaagtgtctacacacgttcttagttttgaaaaggtaagttaataaatttgatccctgtcacatccttctgagacaggtaacctgattgttgacattccacagatgagaaaactgagttgcaaaggaattcaacagcttgctcaaatggcagagccaggattccatcccaagctgcaggcctctcatctagtgttatgttataatgcctctagggatgggtgacatctttgctttaccactgtgatattttgtacagactacaaataacacatctggaacccattctggagtctttggagaagctatgtctagtggcttagagtcgctttgatattagaaaacaaagcaaaacaaaatgagaaagaaaaaaacccaacaacatatgtgggatatgtgatgttgtttttcaagctacacaccaaagtggtgtctttagcctagggactgaccaaggggacagccaaaacttcacatggctgttggagtgtccctccagtggagacacctccttaattggctcagatggtctttccagagctctgcctctgtggtctaggcccttcagccattgttcatgagaacaacactgacagacaccagacttggggcagagacagagagtgtggagtgaactgccatagacaccatcgtgttaaacaaagggaaagatgacaatgtggcaaacccttcagctagttctctgtcctcagttgtcttcctgtgttcagtatgagcccgacattctgtcttgctaatgagctatgtcacctatttgacattccccattctgccatagcagcaggacttacagaccaaaccagagtcggcagcattgcatgcatgctgtctttgtccttccataacaaaggccttggaatttcagctagaacatgatgggcatctgcccactccaggattcactgctgaagcctggctatccaaaaattacagtggatccttgggttagatgatcccattaatgatgaagtcatttctcccagggagaagttcccccaaaccaagctagtcctttagaaatcctctctggaatcagccagggttaactgggtaccatctgaagcaccaagtccatgtcccctgagctacactgccatccactcagtctttctgtatttaacaccccttagtggccatggagcagtggattcccaaagctggagttctcatcaacaatcacctgtgttaaaaaaattaaacaattttttaaaaagcattgcacaacagttcttggaactgtctatcctagcaaaaagtggtacctgagaagaaagcttggtgctacctgtagcctggcatgtttttgtctgggaagcttctcttagcagccttcatgctgtctggttctcaatgtggcctgtttgatccacgatgctgattttgctaactcttgactgtttccagcctgagaactgtcctctcatctgagaccacgtgtttgttcctgactctcataagcctgcaactctcttcttattctctgagccctcacgagctgccttgaaggtgacccttctgtccctacctttactggcccctggcttgatgagcttcctacatttcccccttcctttaattataatttttatttcaaatttctctttccaagaggtaaaatgaggccttcatggttctatgaacagacaagcagctaactgtcccattaatggatggcttatgaatggtttacatggatggattatgaatgagtcacagatgatctgttaggctcaacaaccacctcatttaacgactgctttgttattcataacaacatccatatttaagatgaaaatttaaggggttttaagtgaagaacttaaaatttgcaaccttatgcaatagaaaggtaaggttcttattctcatctccagggcacacccacttgtaactacccagtcacatggtatgtaaaggtgtcagagggtgtgtgtgtgtgtgtgtgtgtgtgtgtgtgtgtgtgtgttatagaaaaggctcagagtcatctcagtcccatagggaacagactctagaccccatgtagaaagcaaaatttccagatgattagatcctccacatatataatgcagagtttacatttaccctacatcttctttgtgggtactttaaatcattcctggatgacttttaatacccaaatccaatgcaaaccctaaatagctaccacattgcattgcttggggaatactgatcaaaaattctgtccatgtttaacacatttgtaatttttccccaaatattttcaagctgaatccatggaaaaggaacctgttgatgagaagggtcaactctatctatatatggacaggccctgtataactgcatgcatgtaaacctggggtttcttgttattgagttgcactagtcatctgttttggaaattatgtctaatttctcaatcaaaatgtatcatcttgtcccgtgcacatgtgactctgcctcattatctaaactgtatatactgttctgctttaaatggatgacaatgtccttttaaaacacccagtgatagaaatcttacttgttgtcagctgctttgctgaagccatgaacaatgagcatccttggacatctgtctttgatcactactttgagtatttctgtagagtttagatttttggacaggataaagtatccatgaccttcagttttcctactccacataatgaggacagcttgccgcagaccgtgagaattaaatgagatacttaatattatgggatgctgttattctaaacgtctgctgggaattttccacttgatgagtttttattgtcaacaaagacttccttccaccacaagtagcaaaacagagactggaggacggctccgtgggtaaagtgtttgccctacatgcctgacaacctgagttgggctcttcagagcccacatcaatactgagaaagtggaacacagtagcaccgtgcatctggaaccccagtgcatttctctgggaggcagaatagttggaagcttgcatgcagctagcctggcatgtgcagccctgaacgaaagagagagggtctctaacaaggaggaaggtggggacccacagctgaggttgttcttcgacttccgtacacacactgtggtagaggcatgccccccatatgtgtgtgtgaggggggagtgtgccctcccccatacaacacagtaaaagatatgaacaactcacctttccagactcccttgcaacaaggaaaaaatatcatgcgaattccaccaatcacaaatattcacagaggacttgacccagggagcaatctatgcaatagccaagagcccatgttgagtctctccttaatgagtggctggagaggtggctcagtcattaagagcatttgttgcttcggcagatgattcagattcagtttccaacactcacatggcagctatcagctgtctgtaactccagttcctggaggttcgatgcccttttctgattttcacgggcactgcatgcacgtggcatacatacgtgcatgtagacaaaacacatacacctaaaataaatcttcagaagatgaaatgtccttatgagagatctatagctggggtgtgtggtgaccaatagaagctggatcttcattatgctgacttggatttatgctgacttggatttttgaaacaatttaatgacgtgtgtgtgtgtgtgtgtgtgtgtgtgtgtgtgtgtgtgtgtgtgtgtgtgtgtgtgtgtgtgtgctcgagtcgcatgccaggggacaatttatgggactcagttctctccttccaccatttgggtccctgggatcaaatgcgggtagctaagcttggtgactagtgttagctgctgagctctcttgacaacactattacaactgtttcaaacatggcttcaggtactgtttctggaaacttaacctcatgtacacaacctaacatctctgagttaattaccccaaatcatatgactacagttaagtttctggttaaaacagcttggaaattttctgttgtctgtaattaagaacactacctatcatatatggatagttaccaaaatatgaatataagtaatagggaatatgcacatagattatttactatcaatgggttctctgtttttcgttgacagggtggatgttgacccatattgcattaagggaaacagaaaactggcttcttggtatttcctgtgaggagtttccagtcctttccagtaaggacacacataagaaaaccatcctttcttatagctgtcctccattcttatgttctagatgctgtcatataagaatcagctgcttggagctctggcagctaatttctgcctgagaagagaactgttatccagtgcacagatgacagctttcaagaatataagactcttggtcctgcaaacagcactgactttgcagagcaaaccagaatgccgacttccaaattatctttaaaagagaacaaatccccacttaagacattgaacattggacattcttgttatttgtatctgaaggaaccctattttttaatgctagttttaaaaatgctttgagcctccttacagcagttgagagatgctgagctaaagtcaagaagcatggcagcatgcaggctgagaattctacatcttgatctgtaggcagcaaaaggagagaccgtgtgccatactgggtgtagcttgagcatatttgagacctcaaaactagcccccacagtgacacacttcctccaaggccacacctcctaatagtgccactccctatgggccaagcattcaaacacatgagtgtatggggaccatacctatttaaaccaccacagtctccatctggtggaactattttaatagatagtggaaacttgagggggtggagccaagatgtaggaagtaaatcacaaggggcgggtgtatctatagtggttatgattgttccagattctcttctctcaccacttcctgtctgtcctaaggagaagttcttccacctgatgcactcactattacacaagtatatgaggacaagcaatgtggactgtatcatccaaagctgtgaagcagaatgaatctttcctccagaagttgtttgcttgagttttttgaccacatctctacaagaggtagtgacatatttgttttggggcatttctatcaccacggaaaactccttcttggcaagtttcagttaatcctctgctgccagctctggccacagtgtgctgatggtctattttctatctctgtcaattttctatacagatataaacatatcacatacagtatggtttctttccttcttcacactgtgttaatgctacaacatgttcctatttattgctgaacaatattcaactgcctaggcataccatattttgttgatgaatatttgggttccttttcattttgggacattatggacagtcctgcagagagatcggtgcatgtggccttgtgtggaaatgtttacatttctccagagtatattgctaagagaaaacctcatacaattcatactatatttttttaacttttaaaagaaattccaaatgttttccaagatgtaccttactacaccaatattttttttcattttaacattctattttatccaattcttgtcaacacttatatttgtcggttttaaggactttagccactctggtcactatggagtgatttggcattgtggtattaatttatatatcccttgtgactgatactgaacatcttttcaagtgcatagtagccaatttttaccttctttcatgcaatgtcttttccaatcttcttcccccctttccattgtatttggtggttacttgcattgtaaaggctattgacatatttttaaacaagtgagattgtgggtattgtttcctatagccatcattattttccaagtctgttacatgacttgtgaatgttgtctttcacactgtgactgacctctttatattcttgtgggtgttttgcagacatacatagttttaatttggatgaagtaaaaaatactgaattttttttcagtttatgtgttatgctttggccgactcaaggtcaagaaggctttctcctaagcattttctacaagtgctgtagttttagctattgaaactgccctttctccattaaattgtctaacatattggctgtctgattctgcattttctttcttagagtatgtgaatgcacaagagtgtgtgggcatgttttgtgtgtgcatgtggaggtcagtgtcaatcctcaggcacctttaccaggtttttgtttgagacagggcctgcatttgccaagtaaactagacgtatctctgttagttcaaggccatgctgagctacacaaaattgatccagtcccaaagagaaacagctcacacaaagatgatctcagcacttgggatcacatgcctttaattccaggacacatgagaggtattgaagataggcacagggtctcagagctgggaattcattctccagcaacactgaagagagaaagacatagagtctcaggagtccttagccacattgaggagagcatagctgtctgagtgaatctgcggagcagcgaaattgggagcatcaagtctgggtgtttacattccttctgaggatctgaactcaggtcttcacacatgtgaggcaagcactctattgacaatacccctggaactgcagggctaagccccccaggtacagccaaagttgaagctgaaacctctggaacttactagcatcactaggtctcctttgcctttctgttttagacaaagatcttgacatgttctagaatcaaacatgctcttccagccttacaagatgtgttgtgccaatgttgtcatggtctatttgacagaaacctgcaaaggaaactgactatgcaaaaataatcattattattgtgttgttgttgacctccatacaagtataaaatatatcctgactgactctaccaactccctgtagaaaccctgaccccatctcatcttcctctcaatttcatttcctccttttttatcaatgactttttaacctacagagtcagtccagttagtgcttgctgtccctacttgcatgggagggaggtggacatctactggtgtgtgatgaacctatctatgaccatgtccctccccaaaagtgactttccctctcctaacagtcaccaattgctaatagttccccagctagggataagacctctggagctccttcccacttaatgcagagagactcattactattcaagtgcaactatgatcagttagccatagatgagaataagcaactatgatgacttagccctagatgagacgtcagtatattctttctcctatgctcagggaaatcacaaaaacggggtggagagaatagaagagctggaagatggggaggacactgataagctttcctttgagcatggcatagctgttgctcacatatactatggcatctgtggttagcagcatatgacctacactgtatcaacacaattacaagagcaatcctaaaccaaaatataaccacaccctaaaatgatgctgttctttcaggagccacatctactgtgagctgttcataggccatggacaagatgtgactgagtaattcataacactgggaagagctggctttggggcctgctgggtttgagtggcatgcacagtgctttgtgtatattgtctcctctagctatcagttttcaagaaccctaaattgtgtttcacaaaggtaaggtaactttgccaaggccgcaaagcccagagtatggattcatacctgaccaggttatctataaaataaaacaaacaaaaattcacagccattaataatgtaacaatagcctggagaatatatattacttaacatgcctgcatgtgaggctggcaaaatccttggattggtgagttcttctgcatgagctgaaatgcatagactctgaaatttctgccctgatggcaatttggaatttgacctcattacagaattgcaagtctaaaatttggtttactgttcctttgagtttcttcctctttatattttatctttattttattattattttaaatatttatttatcaacttgggatagggcctcactatgtagtcctggctggatcagaatttgctgtgtagaccaggctggcccagaacactcagagatccatctgagattaaaggtgcacattgctgtgcctggcaaacttcttccttatttttggctaaagactcctgagactatatgcctttcttcagtgttgctggagaatgaattcccagctctgagaccctgtgcctatcttcaatatctctcatgagtcatggaattaaaggtgtatgatcccaagtaatgagatcattttgtgtgagctgtttctctttgggactggatcaattttgtgtagctcagcatggccttgaactaacagagatccatctacctcttaatcctgagtcctgggattaaaggtgtgtgcctggtttctatagtttgtggctgactttgctttctgaatcctcaggcaagctttaataaatcataaatagtatatcaccacaaggcttggagggggaaatactctctaccatcagccatcacgaagacatggtaccttgtctgcattcctctaatgggatcttgtctgaaaaggtgatgtccatgtgatacctgacacttctatccagactgtgttgtcacatgtgggggaatactcttttattcagcttgaacactgagcccatctgctgctatctgtccatttctggtctagcccatgttcagaccattacctctattctccagctcggtaacttttgctaaacctctgaactccaagctcaaaagtgaattaaattggaaagcttctctggacctctatcttgtctacctggaaatctcctatgttcccttcaagccctctaccaaacttttctttcccaggaagcccttgttggtaccacctttccaaaagaattctctctctctctctctctctctctctctctctctctctctctctctctctctctctctctctcacattatttttcaaagtcttctaagagttgagcattcccaaactcaaaaatccaaattctgaaatgcttcaaaatcagaaatgttttggccactgacatgatgacacaagtgggaaattccattggcttcatgtgacagattgtaatcaatcaaaattcagatacgcttactaaaagtattatataaaattaccttcagggtctatgtataagttgtatatgaaaaataagcaaatttcatgcttggacttgggcttcatccccaagacaactcattatataaatgcaaatactaaaaaagcccaaatctaaacatttctgcctccaaatattgtggctaagggatattcaacctaagtagcactgatcccatggtacccaatttatttccacatctgtctatccagcaatgacttgaactctgcaaggttggcatgttgtgtctttcatctctaaacaacctcacacaggtgggacagagtagatgcaaaatgaatgttgatattaataactaataattacagttcctggatgactggagctatgtttatactttcctggactcccatagccactgctcttggtgtcttcatatctttttccttctcttcctgggaatacagcttctcctcaccccctggttatataatccatgtagggttgtcagtcatagttctctgttccttcccacagtaatggccgtgacataatatgggctgaacaagcacattatcttataccctcgtccaatgagtagggaagaaggaagagaagtgtgtgacccaaactggacccatcatgaaccttcttggattgcttttctttcattcatgagtcatttgtcaaggcttttttatgttaattgatacttcatagctagctaaattacctttatatagagctaaaaatctgtaggcaattgtctaaattattgttctctaagatgtcaacattttaaaagcaccacaatatattaatttgcacacccatgtaaaatggcacagaagtgatggaagcattaaattggcggcttgcaaacttcatccagaatgttctgttccttctgcttgatatctctgtggaattgttccctgacaattgttccctgatgattcttccctccctggaactccattctgctctggtttctgtggcaattgtgcttagctgagttttctacttgcctctgtctccattgtggatttctctttccctgggatttgtacctgggtcaaggtggatataattttataccatttaggtcacaaaaaattagatgcctggaatcagcccctctggtggccatcttcctccatctgtggaactctgttctcagcaggaaagactgaagccaggcagacacacagtggagtgatggaggaatggacagagagagtgcacattggggagacttcacagtcttcagttccaaatgtgtaggggtttctattccattcacctttattgtctttctctatacctcatcacatttagataaattctgctaattggtacctaaattttacccccaggccctcctcctgccactctcagaacacacaaacagtgatgacttagtgcagtgacatgtgcaagtccagatcttctgcaggaaggtgaatttccatggccagtgatggtttatccaggacacagttcagcaaacctgcagtttgcaatcattccaccttcctggaaagaggcttaaagccccagtctgtgccttacctccagcacagccttctaagaaccctgaatccttaagaattcttatgtttgtatgcctactcggaaacaaagaaatgtttttctaattttagaaaattgtctaattttagaaaaaaatcaactaatttcctttttcaggtggttcctgtaaatgtcgctgtttggactggggacactgggcctgaaggcagctgctatgtaatgccatcctcagctttgttctgcttaacgacttttgttcatgctcttgtttaaatgaaggactgattgaaaactgcaggactaaaatagcatacacaaaagcattatgtctttcagagtctcggagaaaaccttactttttaagttcttgaggacccagggaaatggcagccactatttcccttactatgacactctttctagcaaattctccctgaaaaccagcagtgatattttacatctaacagtggcaaaggagatagacgtttgtaagaggtcccaaggtaaattatccagacagtatttccatagctgactggaattagatttgggtaacttaaaacttagaaaatccaagggagcttaccccagcagtgctggcctttccagctaatctgttgggcatcggtccactctttgcttgtctctattcttgattgtggggatggcccccacagtgggtgtatctagagcagctgtgagagcaaccttcttaaaggactgtggctcctgttcatttgatgaccaggatctaaaacgcttcgagagaagaaggcacacagacaggaaaccaaggcatgagccacagccagagtcttccgggattaagtacagcctgaagggagagcagcttgggattttgtggataggatcctcattcttaggattgttgcatttgctttcacaactgccctttgctcccttggcactgaaggattcccatctgatgcaggtcctctttggactctgtggatatcataaggtcagtgagccacacccacacatatctgtatctttaccgtcttgttctggccttattcagccccagctcatccccctttggctgcatgctcacacagtcactgatcttggtaactccagccatgctcagttctagatctccattgatttcaaggagcaaacaaagtagaagtcctagaatagaagggctcaaagcaagatcctagagtcagcagctgctgcatgacctggggactggtgagaaatacaaacttctagactctggtgagacctgctgaattaaagactcctggggtgaggcctgaggatgtttactttagcctacccaccaggggcagagttgggagctaaccgcagcatggaaatggattaatggatgtctaacttactgcagcctgaagaactattagcatgcagagtaggggagttctgaagacctggaaagcatcctacaggcaatactttagggcacaggatatgctacagccagacagaatgacttttgacaaatgcggggaccaaaaccagctgaagagtcaaatgagctctgtgctttcccaacaccaagtgaggaaggaacagcaaatgtagggatggaactgtggtggcaatgggggtgtgcagggatgggggtatagggaagggggtcaatcatgggtcttgatgttgctgctgaggaggaatagatcattgccaagcaattactttataaaaaagtaaatttcttagatgatcacattttttatttctctcattctctcaatctctctctctctctctctctctctctctctctctctctctctctctctctgtgtgtgtgtgtgttgtgtgtgtgtgtgtgtgtgtgtgtgtgtgtgtgtgtgtgtgtgtgtgtgtgtatggtattcaacctagtaagtttgaaagtttggagaaggaggtaatcagtggaattctgaaccaaacaaactcatcttctcgtgcactgacagattatccaacaacaccattctctgccattcggaagaaactccttgtcaagttctctgagcactgagtgcttggttgcctgctcatttaactcttcacagcacttagggggtgtggtccattcctgaagaaagcagcagtagtgctgtgcttagcagaccctgcctcacctcacaacttctttgctttattgctttgctgccctgaaaaaatacttgagaaaattctcctagaggagggaggatccaagtgtcttagttagggtttctatgaccaaagcaacttgaggaggaaaggtcttatttggcttacacttccacatcatagttatcattgcaggaagccaggacaggaactcaaacagggaaggagcctggaggcaggagctaaagcagaggccgtggaggcctgctgcttactggcttgctcctcatggcttgctcagcctgctttcttatagaacccaagaccatcatcctgggggtggccttatatgcaatgggcttcccctccccatcaatcactaattaagaaaatgcttgcctacagcccaatttatggaggcattttctcaattgaggctccctcctccctgatggctctagcttgagtcaaattgacgtaaaactagccagcacactgagatttcaggcctcagtcacttggtttctgggtctctggtaaggcagacattacaacagggagacatgctagatcaaaactcatgggaagcaaaaggaaacagggaagaagggtcatggacaagacatacccttccaggtcatgcccacagtgagctacttcctccaacttggccccacctcctggtttccactacctcccaataaggccatacagtcatggctatcgattgatgaatacaccgattaagccttcacaatcaaattatttccccaaaggagaaccaggtcactaacacgcagcttttatatccaaacctgaacagtaagcaagatgccaagcaatgcctctgagtaccttgaccagatggaagagccccactctctcctcccacgtcaatcatttttctaaacatgtgcctgttgagggacagtctctcaaaactagggaaggttctataaagaccagaagagcctggaatgtagaaaaaacagctaagccggtcctagatcctaggctctggccaacaaccataggggagtgcaggcagtcccagagaatcctcaggttcttccctgcaaaatctgcctgtcctcccagacttagtgacattcctccaggcttctcttgctggctgctccatcttaaagacatttcatcctgtcaggtgtgccctgcaccatccatctcccagcctctccctctgttgccaaataattagctcctattcaacgaggctatttttgttaaatggctattgaatgaggtaaagctctaggatgtaggccaatgcctctactctctctctctctctctctctctctctctctctctctctctctctccctctccctctcatgcatatacattcacaagccagatatctttgcatctaggtgttttattgttcagtataaaagaacccacagtgataaagccgaacaataaaagctcacttgctcctctgctgcagcagctgccactcgcatcatctgatgttgccatgactgatataaaatcccaccgtgggggctgttactctctgagactgcagtcactctcctgttccactcacccatggcagcgagaagcaatcatcaccatcaggaagacctaagtccaactgttgcctttaccgcttatttacataatcaaccaaatgcaccatctactttctgtccagctcttatctgagctattagagttagccaacaagacagactaggatgtcctctctcatggacttcatactctcaagaaaagagacaataagcactcagagcaagaaggtatatactatattagaaagtgattgatgtgccaggcgttggtggcacatgcctttagtcccagcactcgggaggcagaggcaggcggatctctgtgagttcgagaccagcctggtctacaagagctagttccaggacagcctccaaagccacagagaaaccctgtctcaaaaaacaaaaacaaaaacaaaaaaacaaaaaaacaaccccaaccccccaaaaacaaacaaacaaacaaacaaaacgtaatggatgctatgtgaaagaagtcatagatgaagtcatagatgaggtcacagggggtacttcatggtatggtggagtgtgctcactaactgagaagtgctgcagtgagccttcctgagcaaaccagctgaagagaagcaagttacagggggtgttcctggagaaagcatgtaagtaccagacccaggctgaagtagagtgagtgcaggtcctggggcaggagagatgagagtcgggtgaacatgtggccagagtaacatgaacagtgaataagggaaagagaggagctttggaaaactggaggggtgggattaagctgccaaattaagaactgtgattcttggcatggggagtcagtaaaggattttgagtagtggttttatgcaatccagccaggctgcattatgggggatggtatgtgggaggcaggataggagagacaggacatttcttcctaagacagaagtagaatccaggagaagggtgtgaatgggccacagttgattctggttagactttgaaccttgagtgctaccatggtttcttttgactgcatgtgggctgtgggaggaagagcggtatccagactttgtggcctgaacatcttgaacaatgcaactgtcataagccagggtgccgagtatgaaaatgatctgtcccatagcttttttggagccaggcaggggtggcactcactggatgtgcctttcctctctacaggcctctcttgtcactccgacttttcccagtgaacctacttggctcctttctgaagccctggtcttcttacctttaacttgaggtcagtgagtagagcaaggaacgatcaaaggatttctggagtggaggaatagtgcaaagactaaatgcaccataaatgggggctttaattagacagagggctgggctggctgttggggaggaaagcaggagtggtttgggatggtctttcctctcccggtgtattattggaggtctctggggttttcacaaacactgtcctgattacagtttctaattgcccatacaatccatgccaaacttaaaaaactgtaatttattagtgagtgagtgtgtgtgtgtgtgtgtgtgtgtgtgtgtgtgtgtgtgtgtagggatgaatacgctcgtgttagcatgtgtagactagaggttgactttctgtgtctttttcaactgccttatcactctttttttcacttttgaaagagatttattaaaaggaggtatttatggcacggataggtggacagcagcatgatagggctctgatcaggcccatatgactgagtgtgttgggggtcccttcctacaggcttcagaggaaaggggagggagtagatggaaaagtttccaccaccacccctttttacttgagacaaatttctcactgagtctaatgcacactctccaactaaactggctgacgagcaagactccacggtagacctgactgttccccaacactaggatagcagacatgcactgttgtgcgggtgtgagtctgaacttaggtcctcatgcttgcacaggaagcacttcacccactgagccaatgccctggctctccaggccaggctttgaagcattgcttgggagcttgccgtggcccacaccagcattgtcagcggtcacatcaaaccatgattcccttagcaacttctgagtgcatatccagacctcaggccctatccctagctcctctagaacacctctcctgtctcccacttgtcaataatgtcctactgtttacctgggaaaccatctctgtaaatcctctttgcccctcgaaccatttagtcattttgttgttgtttgctgtagtgctatggattgaacacaagaccagtggtacttactacttgtatatcacagaacaaggtgatattcaaatagttagctacttgtataggacactggacactgaccaatcagaagcatcactggtggccacctaaaagcttgttaacaccagctggataccagccttcccacggtcttgtttggtaatttgcttgcaacctctatttggtgactctgcagtcccataggccagataccatcatcatctagtcccaaactccccaaagagtacctgtcaactgctaacctccctggatattttctgcataagcagtcatatgaaggattaatacagaggtaccagcctcccaatttctcaccaatgagtggtactgtctgcatcaggaagcctgcctttatcttactcacaggctacaagaaggctccatttagttcccccatttacccctccccttctcatgttggagctgaaggtgtccctaagatcaagttttcacaagctgcacagccaaaacccacagcaccttctcctgccatccgctccagtgcgagcactaggccccgggtgccaagctggggaagtggacagggagggcggctggaggttgttcgcatgcgcagcttccagctcggtccagctttggcaacttccgtcccctacttgtcttcactttcatgctcaccttttctagtcccagctggaaagtgtatttgggaaatttattccctttctgtcaggaaaagcaagctccaaataggccagagtaaattgcctagggatttgaataaatgattatttttcctaagtggcctctcacacatagccgaagtccgtgagtttggccaagaaaataaatagaaggaaagtgagaaaaattagattaaagagggttggacaatctacacagaattctcgaaagttcaagctagaagaggccccggagagcagctatcaagctgtttaaaaccatgttcccaggatcccttggggctttcaagaacggggcgggggggggggtatggaagttccaagaagctccatgaagagggacttgagccaagagaccaagattactgcatggaatctggatccatagtgggcctgtcaagcaggaaatggaaacaagggcacttggtcactcctggggactgcagatgcagagagatggcaggagaggtgagtggcttagcaggaaattctggcttttactagcctacgaccggctcaagcaagagcaatagtgtatccgttgttatgtgcagttggcagaaattcacaggtgagactgaggtagcctcatgtccatctgatgctttttagagagttgaagtcaaagtggtgtgtcagcaaggtttccaagattcatcgattccttggggtctcttagttactttcctatttctgtgaagagacaccattcactttggactctgatgtggctatgatcctatgggggccagggaatggaatgtggtggcttgagtgagaatgacctccataggctcatatatttgaatgattccttagcggttggtgaacctgcttgaggaggattaggatgtgtggccttgtgggaggaggtgtacacagggcagatgtaggggtgaggatgggttgaggttccggggtttcaaaagcagactgcggtgtctcctttcctctgcctgccacctgtgggttaggtgtaaactctgagatactgccccagcgccaccagcctgcctgcctgctgccacattcccaccatgatggctatggactctaactctctgaaactgtaagtcccaataaactcttttcttctataagtcaccttggttgtggagtctcttcacagcaatagaaaagaaactaagacacgacatgacacagggctttgttcatttttgtttgggaagaccattactgtttctgtgtctctgtctctttctctccctccctctccatatcctgttgatttcccattgatgagacatttgatccagagttaacatcagccatgtcttaggaacaaacagtggggttgagatgagccacatctgtagaagctccagtctagacatcttttgtgctttgcttgctatagtgtatgtcgggggagaggggcgcagtcccggtgaattttggtttttggaatgacaacacaaacacttgcttatagagctaccatttcatggctcccagcttgactatgcatcttgaagaaaaagtcaggccttccatgggaactaaccctatcggggtgttccaaggaaggacaaaggacttgctgaaaaataagggtcatttgctctgccctatttaatttttccagaggatgtgacaagctatggaaaccaggtggctgagtgaagttaactcacttaatggctcttgtagtcagtccattcccagtgtgttagagtttgctgctcaacagcaagcaagagaaagctcagcctggcacggaaacgctgcctaatctctgttgatattgggagggtctgcagctcatcaagtggaaaattggaatttaatgggaaatgactctcggaaaggaattaagacatcttcttgtgttttacgtgttataaaatgttgcatgacttccaactgcttaattacagagctattcattccccaaacatttgttgagtaattggttggtgcatttccttagtttttcttcagaaaacaaaactcatgagggtgccactatgagagcctcctgcccctgagcttagtatgttctctttttaagaaatcattaacatttacacatttttaaaaaatgactacattttaggtgaagacatattttaatgaacttatctgtctctcatgcctttgtgagtatgatgctacagaggggagagagccccgcccctaaagaaggaactggattccattcccaaggctgccatccatcagactcttggactatagtgactcacatcccgtctaaggctctgatttcccattgagagaatgagtgttacaatacccatcacacaagggaaaacccagtgataaaagagatctctccatggtgacatcctatcaggcacataataagtgctcacataattgtatcattacaatttaaataatctcatcagacataagtctttgccaaaccaaagtgaactcatatttgtctctgtcccaatccaacagctgtttgccttcactcccaacttagactagccaggcacacacacaatgccctgctgtatcttctctgataaggtttccagttctgaacatcgtgtgggctctctttaccttctgcccattcccagtaaacctatgctgttgtgttcttcttgctgtgggtgaaggcacctggaattggcattggtactgactaggctgtcagaaaatacccatcccttggtatccatgggagattggggacagggtagcaaagaatctgggtgttcacatcccttatataaaatactgtggtatttgcatgcagtctgtgcacatgttcttgtgtgctttaaatcatctctatgtttcttggatacctcttccaatgccaatgctatagaaacagtttgcatgctatattatttaggaaatgatggtgagaaacatgtttgtacatttcagtacagatgcaaatttttaaaaaacacagtattttcaatccacagcaggctgattttgcagatcttggactgaagataggaagggctggctacattcatttttttagtgaacaagtcatgtagctaagtgataagcaaaaccatacagtgacatacacttatgcagttaatcccaagagtgtgtgtgtgtgtgtatgtgtatgtgtgtgagtgtgtgtgtgtgtgtgtatgtgtgtttgtgtttgacaatgggtctctaatcctattgcacctaccctaaagagagccagtaatgtgataatctcagggagtttcacattagagctgggcgtggggagggacaatgggctaggtaaaaccattcagggattttgaggtgactctcacatcatgaccaagattgtgcttgcaccttttgtgaagcactcttcatcctagaagtataggtagtggtgattgttattgttgtctttcaatgtagggaattgcttaaaattttaagttgtgaaaggtttttttctaatgataagtatcttacttctgatacacacacttctaggacacactgatgtgaattatttgggcacagaggcaatggctgtgactgtatctgtgaggctgagcttatgaatttggccttatggataccaggttttaccttaaggagatgtccaactatcaacatcagatgaataataatttgtctcaaatacccttttaaaagcaataacaaatttaactattgcctccttggggttttctattgatgttgaatttgccaagtaacctttttgcacaaaatttataacacacacacacacacacacacacacacacacacacacacacacacacacacacacgagtttactggttctaaatctctgtgctcaccactctatcctctggccttggcaccctcctttgaaatagagaagggcattgatgactctccagcccatctcactggattccctgggccttggcttctaactgtgtttagcccaatggaaacaccagcagacagctgaagggcaggtgagagatattaaggtgtttcctccctgtttgctgctttgcttaggtaactgaaacttcaagtctatgcttccttcccccacccccctgctcctcgaaaggttcaaaagcactatttgttccctttgtcttttgtggggaggtgctaatagcctctcattgccctgatgttccttgaaggttttctcgacctttctcacacctttataaagactttaataaacagtttacttcaaaacctgaggtgagcacatctgtttcatttagatttttgtacccatctttgtttacatagatgtgtgtgccttctctgtgtgtgcagcacatgcatgcagcagaggccaaaagagggcagcagagcccttggaactaaagttacaggtggttgtaagccactcaatgtgggtgttgtgaatcaaacactggtactctgtaagagtggcaagtgctcctaactgctgacccatctccgcagtctcctacacccatttcatattgtgttcttaagttattcttgaaattgtggagttttttttcacagttaaattatgtaagctttatgtaagctcagaatggcttacataaagaacattcaagttgctgggtggtggtggcgcacatttttaatcctagcactcaggaagcagagggtaggtagagctctgtgagttcgaggccagtctggtctacagaaagagttatcagagaagccaggattaggccacagcaatactaactgtgctttgatcatggataacagaaatcctggagtaatcatgtgatctgacttatgagacttagcttttacttaagtggctgaaaggtttctcctagggtactatacccacaatgaatacatttatcaaaatccacccactctacaagatccagaatgagtttgtttaatgtctattttggaacagactttggaatttcaaaataagatatggttcttgtctttgagactatttccctattaggccatggagacagagataagaattgagtatataaatcactgaattgagtcttgagggataagtggaaatctattacatagacagaagatagagacagaatcccatgcagagggaacagtggaacaatgattggaagaagagagtaagcaaccctacttcaaggaacatgaaatcatctaccatgtctaaagtccaactgagaaggatagagggtagtggacaaggccatacttgctgggagttaagaagtcgctggagtggaaagagccctgtgttcagacttcatttttaaggcactgttgactttgaaactgagtacaaacatgattggattaatagcattttagataacatggaattatgacattacaaggggtaggttagagagggattggaactggagacttggagatcacaatggtgttggaagaatagtgaagtaacccatgcctgtcatgatgtaggctggaggaatctggtctccacacaagcagagagaaggcacaaaatccaaggatgtatactgaaacaaaaccataatagaaaagttcaatatacagaataacctacaaaagaaattgtgatagaattaataattagaaaggagatagaattagtaatttggaaaaataataattagaaaaaagaattaataattagaagtcagaactctaaagtttgcaaggatagcagctatatggagcagtcttccatccctggactgaagtattcaaagatcagaacagccaacacctaactaatctttaaaagaaagaaatcactaggctatagagagagctcagtgggtaaagatgattgccaccaagcctatgacctgatccgagtttgattcctggtacccacaaggtggaaggagagttatgattcctgtgagttgtcctctgactctgtatgtggactatagcacatgtacacacacacacacacacacacacacacacacacacacacacacacacacacacacacacctaatttaaaaaagaaaggaaatcatcaaaataaactactaatagagtttaccaaggaaagaggtaacaaacattctaattaagaaatgaaaggaggaaataatcaatttgagggtacaaaatttttttaaaaatgtacttttctggctcctctgcaaataaatctgaaagcctagatgaagtacattttattctgtgtgtttatgctgtgctaaagatcaaactcagggcctcatgcactctggcaagtattctaccactgagcaataacccaagccaacactgatgatgtttttagaacaagagtacaaaaataatcagaccaacttctacaaagtaaatacaattaaaaaagaactaatccacagtgtctccatggcaaatcagttagcacatttggctgttaactgtgttcaagcccacccaggtacggctagtctttctagccgggcgttggtggctcccacctttaatctcagcacacgggaggcagaggcaggcagatctcttgtgattttgaagccagcctggtctactgagtagttccaggacaggctctaaagcaatacagagaaaccctgtctagaaaaactaataataataatgatgatgatgatgaactaatccaccccagaaagttgtcactagttggtttcaaatggaattttacctgatgctcagagtccatgctagcctgatgtaatgtttagaattagtagaagattgaaaagatgggtaaatttcttaagtcctttgctgaagcaaatataaacctgaggattgtatagctagaaacttgagaaaggaagaaagaaagtaaaaaataaaaatagaaattctaaccagtaaaggttttcaaccaaatctgaacttttgaagaaaattcattgaatagaaccttagtctatattgggaagtcggggaaccaaggtacacaatatcagcaaaaagaatctaaccccacagcaaatataacacaatataatcaaatgggaaattcaaagaattcaaggttggcttgtcatgaggaaatctacataatacactattagtaaaactcagggggctgaagaaatggctccatggtttagagcacttattattcatgaagaggaccttggttcaattcccagcacccccctgaaactagttccaggagatccaaagccttccctggcctctgtgggtgcatacatatttgtaggcaaaacactcataacataaaattaataaatctaataaaaccttgggaaagccatatgactgtagacattgaggaagcttttgactaaattgataacatattcataaaaaagacattcagggatgtagaaatggcagaaatgttcttacattataaagatgtgcctcttagtttaaactctatattctatttagtcgtggaatactagaggtattttcactaagattgaaaatcagacaagaattaaaaattatactaaatacattggttaatgccattagaggggacagaacaatcaaagccattggaacaggaaaggaagcagtgattctcccttgatttgtagataataggacagaacaccctgaaaactccagcaaatcagtaataaaataaactcaaataatacatacagggaagtagggtataaaattagcatgcaggatcagtagactttatgaatacagatctatacacacacatatatgtacatggtaatgaagtcatttataattgtaacacagatgaaatacaaaaccagtaggtaaaagcattttcaaaatattattgagaagaacagtgattttgacaactgaaaagctgttccctgctcttgagtatgatagcattgtgaagaggctggctttccttagattgatttattaactagatctaattcccaaagaaggaaggcactaagaatctgttttattgatattggtgctacatttaatatagaaacataaacattcaaacgtcatcaggagacactgaagacggacaactgcaagataaagactatcactgatggacattaaaatgtaacatgaagctgtattactgaaacagcatggcactggctggtgaatggaccatttctatgtcagtataatactatagaccaagggatcaggacagagaattcaaaagataactcagatatatacagaaactgtattcttcaccctttctctgtaaaaatagaaaccagcagtattcaacctggctgaggtccctcaccagaaccctaccatgctataccctgagcttggatttccagtctttagaaccatgagaaagagctataatttatgtaagtcatgctaactatagtaactagctatggcagaccaaactggacaaaataaatagaactcacacatttccgacaggattataaaattcagatgttaaagaaaataatttactaattaaaaggagaattatcacatgactccagagtctgcctagttgtaaacccaagcacagatgtccacataacttgcacaccaatgaacaccattactcgtagtagttccaaagtggaaacagttcaaatagccaatgactgagtagccaaaaatgtagataaaaatgtgaaattagccttgtggcagtggcatatgcctttaatctcataactcaggaggcagaagcaggcagaacccttgtgagttcaaggccagcctgatctacagagctagtcccagtacagccagagctatacagaactctgtctcaaaccttgctcccctcaaataaaaaataaaaaaggtgaaattaactaatgtagtgtatatacaccatggcatattttttcagcaaagagaatgaatgatgtactaaaccatgctataggctggatgaaatttagcaacattgctttaagtcaaagaagctcagacagcaaatctagatatattgtttactgaagcaaatctaagagacagaaggtatttcagaggactggggaaggaggtacagttgggagatattgctagcagttacagtggttttttgttttgtttgttttgaatgttaaacatattgtgggattagacttcagtgagtacacacacacacacacacacacacacacacacacacacacaactatagactttaaaattggtatttttttatgttgcttgccttactaaaatttggaaagagaacctcgtacaaagaaatagtatgcccttcagaaggaatcaatggtgtggttcaccctagggctgctcaccttcatgcaatgctgatggcttcacgggatctgctccgagtttagctttttgtttctcctttgtggtttttgtggttgttcattttggtattggagactgaatccaggatctcataaacactaggcaagcacagtacctctgaattgaagccccagccccatgcttagattcacaatcttcttctctgtcccttttgctctctgaaaacaactctatctgaattccaaacatcctttggattccgaaggtaagctgcccatcactgctgcaccatgagaatagggaatgtgtttaggcatggcttttgtctctgtggtgaagcccaatgaaaatgaaggagatggagagtgaggtaacccagggaaaccctgagctgtgtctgtacttaggattgaaaggcccctttggagctagagaatgtgctctcaatggttaagagccctgttcatcctccaaagagcttgggttcagttcccaacacctacatggcagcttacaactgtaacttcactttgagggtatctggcttcctttttttttgcctccatagataccacacatgcacatggtatatatacaatcatgcaggcaaaatagttgcatatacacaaaacaaaaaataaatctttatacaacaaaaaatggtgacggggtgagacttgctttcaagggacacagagaagaaggctgtttgacagctagcccagagtggtcagtgctcttgcttgcacacatgcaagtttggggagaattacctcagcagcattgatcttctgaatcatcctcagctggcttgatgtcacccttatgggacagacacatctctgtgaggtctgattgaatttactcagtgattcttggtcatctgggaacataacagatgtattgtctccacccaacaaagctcttaaaaggcgtgtgttcgctttgcagtatcaaataccacatgttccttctgagagacagtccttttcctacaggctaggacccaaccccagtggctttctttggccctaagttctctcccgctgagagacaggcctcttgtctccatcctaccacgtttccattctcctgcagaatgacagatggccatcatttagaactagtctcacctggaaaaacaaaaacatggcatcattacacacaaaagcagctccctgggaggtgctgtgctgtcacagcaatgacagtgaccttgtttctagctcagccttccttgggtgtggagggtgcagtcagtccatttgaagacccagatgtaaacatttctattgcagtcttatgtgaacaagagtaggcaggagagcacaagaatgtgaacatttcctaactgtttaaaatgatttattttgagtttatgtgtatgtgtacctgcataagtttctgtgaaccctgtgcttgcaggtgcccatggagaccggagggggttggatcctcgggaactggagttataggcagttgtgagatgcctgatacgggttctgggaaccaaacccaggtcccctgaaagtacagtcagcactgctgagccatctctcaagccccttcagtgactgtcttaaccagaacctctcactgcttttaggagtgatcctgtactcacagcaaggatgtttaggtcacttccaggccatttcttggcatctgttttctttctaaagcttcgtttctgtagaaatagtccaaatatttaggaagataaactcaagacccaggaagacatcccagtacccagttaccaaaagaaaagcatccagcagtcactcaattagcacagggaataagacacagggagggggtgagcatttaaaaaaacttcaaggttagaggttcaagtgtgacatttttggattaatgtttaattaatgacacaactcagtagatttgggtcatgaactctgagtaattgaaactgtgaggattgctatgcaaagctggtatatacctgcccccttcacaattcctagacacatttatttggctagaaagcatttaccttaaaatgtggcatgccactgaactacaaatttcttttttttttttcttctagtgaaaacactggaagatggaggtcagttttaatctggaagcattattaggttctcactcccccccccaaccccgccaccccgagaatcctgccctagtactcttgaacagtccccatttgactcccattggcccagacccattgattaggaggccctctgggaactcatggggcaagtgttgggggcaagaggaaaatcaaagatggccctttgcttcttttcagggctccctggcccaggcctgtcttgctggctttgtgattaatgggggcccctcatctaccctttgtttacacttgtcagagtcccagtggagagaaaatcgctaacgtagcacggagaatcaagtttagccaaggccttcaattagaagctaatgattaaattcatttggcattcttcactccagtaatgccattgctcagaaggaattcttcctcggaatgtggctgccttttacacttccagccgcatttctcatccattatcactaaataatcttcagttcttgtaaatccctttgcaaaggctccgtctaaaggaacttaaaaagagtaaatcctctgagatattacaggattcttgctgtgtgcctcccgtaggcttccatgagaactgttcagcttaaaccctgggcgttgctttgaagatgcagccagtgtgctacaattcaggagtaggggttgggggagggaggacggaaggaaggacagccatgaacagtttgtaacagagcgagcatctgcagtggtgtgtggtatttttggtgtggaaaaggaggggaaaagaaaaactctgatatttgcctgtcaaccgctttttgatagagacttcagtctctctccttagtatgagagattagcattcacctgggagagccttgtagagtgatggggcctgaggcagaatagaaatatgaagaaaagaaatgggtttttgactcctacctttagttattaagcagtaacttaggacctagagagctagctcagtggcatgccacacaggaatgaggacatgtgtttgattttcagaactcccattaaaaaaaaaaaagccaccagtaaccccagtgttggagaggtagagatactggaactctctctggtgagccagtctagtcaattaggacatttccaggttcaatgagaaacccaggctcaaaaataaatagattaatgataggtagatagatagatagatagatagatagatagatagatatagatggatagatgaaaggtagctagaaataggtagatagatgataggtagatgctagatagatgctagagagatagatgatagatggaaagacagaagatagatagatagatagatagatagatagatagatagatagatggtgaagtgactaagagagacactcaacatctggccttgttatacacagactccatcacccacctatacacacatgtgcacatgtatacacaagaatacacatacacacacaaattaaaatgaaaatttcttgaaagcggcatagattatggatctagtacagtagtagagtgcttgctcgctaagtttaaaggcctatgtccaatattccctgctaggaacacagctctgtggtggaatatgtccttacatatacattgccttggacttgatctccattaccaaaaccttcctaaagatgtgtatcttctcatgtaagtcatgaaatgtagcttttctccaccccagaggtgtgcccgaacacctgccatgcactgctgtgtgcagttgccaatacttgcagcttccagagtgcacagggcctcccagcagccagagaagcggctctcacagttgcagagttcctatttttaatcattcttgccagagattctgggcatctccgttttactctctccatttcaaaatattttctgattgagctccccttttttttctttttttttcagaagagataataaatggtagatgacatcatctgtgcgcttcagagacattttcctccctgcatggctcctgtttgtacagttggtcagcaggctttgaatacttaacaatgggcctgaggctttcagctctacatctaagttatttattttatttatttatttatttatttatttatttatttatttatttatttatttatttatttcagaagtcatgtgggtatcccagttcatggaaatttactaattgcagaatcctgtcggaaagctgtgtgatacagcaatggtaagatcagaatgtctgtccacttcctctctgtcccaccatgccgagccaaatcccagaaatcaccaaatacccaagacaagtgttggcttgagagtgtgctagtctgtactattctgtgcatgcaaaggtccgaggacagcttgagcaagtctgttctccccttctactatatggagtctggggatcaaacccaggttatctcaggtgtgacgacaggtgtctttacctgctgagcaagcttagcaggcctagaaaaagttaggtcctttgttttgtcctttgttttggtttttcaagatagggtttctctgtgtaaccatcctggctgtcctggaactcactctgtagaccaggctggcctcaaagtcactgagatctgcctgcctctgcctctgcctcctgagtgctgggattgattaaaggtgtgtgtcaccaccccctgtcattggaatgagatttttaattgctgcattttctcaaatctatgagactttgaaaaaaaaaaaagaagaaagaaaaataaataaccacacaagcaagcacccagcaattaactctaatgcatcagctgttgaatcactggttttttgagatgtaacagaagcacacatttttgagttgaggaagaatagtcatcactatgtacattgtgtgcccacctctctgcctgccacagtgtaagcatgaggtcaggaaacaaattccctggaagagagaagatcacacaggcaattgctgtatagataatcacctacgcctcatgggccgggctgaaggctgttaggctgcagagaagtgagagctggggagaaacctgaagggaactagaggggctggacaagctgagttttaagaataatagcggggaaaggaaatcattcataatgaaaaccaaaactccattgttgaggaaatggtagggggcggcacattgtggacagactctatccataccaaactgcttggtttcagttccagcctggccttttcatcacttctgctggcttcagtttgcttgtttattaaagggagttaactttaagccatagttaaaatgttgcttaccattaattaggtgattaataagaattgctttagagaaattatggtaatgccatgtgtcagagaggagaaaacactcagctaccctttagactcagtgcatggtacctgtgagttaaaatgacagaaaacaaatgaatgcatatttttatttatgttaaaatttcctgtgagcagaggcttcatagaaaagtaaaaactgaaagatgtggttagactcagagacatgtctatagtcttaatgagaggttaagtctgggaaactgattgagacaacaaaggggtttgatgtttctagtacagtgttgtgaagaaatgacccaggaatgcatggagagccataatagaagatggaggtcatttatttaaggctatttgtgcatctctgaccatctctgatatccatctcttatgatgagaacattgccacatactgacaaaggaaaattgaagatgatgatgctattgtctctagggaaatttagtttctgtctttaggaaaacaacaacaaaaaacaaacaagcaaacaagaaaatgtgtctgtatctgaaaatggttgattttgaggttatagtcctggtttccttacatgtaaagagctaagttggctaaacaacataggagaaataagcctggagaagagatgaatgtttcaggaagggtgggactccatctttactgctctttagacatgggagcatacttcagaatgagggcttatgtgttctctagcttcttggtctagaatatcctacccatcaccagccatttgacttgtttcttctttgatgaaaggttatattatagattctattttggacacccctatggaaaacagtactactatctaccattttctacttgttatcccactttttaggaaatagctctttatatatatatatatatatatatatatatatatatatatatagatagatagataatatagatatagatatagatatagatataggtatatatagatatatctatatctatatctatatctatatatatatatatatatatagagagagagagagtaggagtgtgtgtgtgtgtgtgtgtgtgtgtgtgtgtgtgtgtgtgtgtgttattcttcagcaactagaatgtaaattctaggagagcagggcttagacctgtaatgacaaaaggttgggttacaactcaacagctaatgtgttgtagctcaatgttagcaagcctgcctagcttatgcatgtgatctctagcaactgcctaagaaggaagaagtcatcaaagctaaaagatgtgggtaaatctactcttctaatctagcaccttcttttaaaattaacaataaaaactgcaaagctttgaggtattccagcatttgtaacctctatacttccccacaacctactatgtgagtgagggaattgtctatctggatgggaggactaactaatcactggatgagcaattctctctccatgccctgaaatctgtggttcagatggctttggatcactcagtgtggtgggctcaaccatgatgctgagagggtccaactgtaaacttccataggcaaagaaggctttgcagattaagttaaggatctggggacaaatacattgcagtatgttatctggagtaagacctaaatgtcatttcatgtacactgatgataggcaggccaagggagatttgactaatgctggaaccaacaggaggatggatgcaagataactctccattgctggctatgaagatgtagggagtgggtgtgtgctaggagatgcagagggtatagttccaaagaaatgagggcagacaaggacacagacttttctttctgtgtctcaggaggatgatcaattccaactttcacccagtgacactgatttcagacttctcatctccagagcttctggtgaatacatgcatggtgttttaagactcgagatggtatgtttctttcaatagccttagggaactgacatgctcatcagtcccttgcctccctggtccagttggtcagtcaattgccttcctgggacaacagacctggctgttaattatgtggcttcccatcttgacttaccttacagcagggcttctttatcttcaatgtattcgactccctcaagatgttaactcactaatcacaaacaatggttctcctgttgatttccaccttgtacctacttgaatgtaacagaaggcaatacgggccaacaaatgggattctctggggatgtactgtgtcctggtttggagacataagggagcttagcacatttagtctaacctatcttacacacactgtctcctctgaggaaattaagatgtggtgaaaagcatacagagaatgctttgaaagcaaaaatagtatacatagcaaaagcatcttgagccaggtgtagtggctcatgccataattatagcacttgggaggctagagctgcatagtaacttccaagccaaacttgactgcatagtgacatcttgtctcaaaatcaaattatttaaagtttttgtatttatatgtttatgtgtatggagggcacctgcttgccatgttgtacatgcagaggtcagaggacaaccttggggagtttgctctctcctaccatgtaggtcccaggaattgaactcaggtcatcaggcttgggaataaatacttcagccactgagccatctaaccagcctcaagcaaattattgttactgtttattattgtgctaggcccatagacaggctccattaatacagtatttaaatggcctaggcctccttgttaaggagtctagagctagggggtggggtttgaaatacatacacaggaagaaaaataaatttcttataggtaagtattttatcaatctctgataattaaagtaatatgatctgaggtagaaataaacaaattaccaaaatgtcacaaacctctgagaatagaataggagcttagaatattataagggatatttcagaaatgtttattagaaagaaaaaggaaaaccagataacacttttagagaatgcttgatcccctaacaccttataccacaaaaatcttaagggttgtgtatgaaaaagtgtagggagcaatcctgttgagaggtactgctgaccacacctgcttggggctggccacaggtgtcacctatgaggctgcaatgagaaccatcagttgtgatggtgcagaaagagaaaatggggcagtcaagatgagtgacttgactgatttgttacgtatataaactggattagagactactttcctagaattctctacatttacaaatgagatgaattaacatatctaaatataggccttttcatctatttacttcggagtattatatagcttccaatggaatacattagctaaagcaaatggctataatataacataaaggtagcaaactcactacgttccttagttatctggtagtggggcaatgaatgatgcatttatcctcccaggtgaatagcattttctgtattcttcatgttcttcaattccacaggtttttataatacaagcaaacaaataaatcttaagtgctaccaaacctaccacactggaacacacctacgttttccagataataatcttcatcatttagagattgtgacactagtctatgcctaacctacctctatttgcacaacaaaggaagatacttgttgggggaattcttgtatctgtgctgtgatacaatctgaaaagcatcactctcataggctggcagcctgctctgttctccctcatggcattccttctcaatgaggtaatgaccttgattttgtggtcatactgccaggatgcagagtttgcccaagacaagagaggggaagaagtcgagaaggaaatgaagagggagttggatacctggaagtcacaagcccttgccctatgtgaggactgctcagtttggggagaatacctggaagaagctgcctgcctcccaccccctggagagtgggtggtatgcctgtaccaatgtgagatcacaggggtttcactcctttttgttttgttaccagtgcatccatatcagacaaggtaataagccaaaattaccctccaggctggtcaatcatttctaagaaagaatgtgtggaatgttgttgtcccctgctttcttgaaagggaaaacaaaacccctgaaggatttctggaatgaatgatgcagcaggttcctgcttcaaaaccaccactgccataatcctgtatatgaaggcaatgtacttctgtggtttggtccaaggctaagtggccaaaactcgccagcctgtggcttcattgatctgtgctcgggagggacagatacttgggagggacagaaagaatgaactcgtttatttaaattcgattcctttgcttattttccaagttgttttgcattcactgtgttctaccagcttggcttgtctctagaaatgaatttactttctccaaggtctaccaaaaatacagcagcatgtcttgggctatcctctttaggtggcaatgtcagacaaagaggtctcccagctttatgctgggagaaaagacaacacgaaggattacagcctgttttaaaactataggagttctagaacttccccaagatagtgtgggttgggggccttctgatgttcaaacctatcccttttaattccttggtgtgacagtgaaaacctcacagcaatgcccatcccccctctcttttttttttttgaataaccaggtgtgtgctatcatcttatatgccacaatatgaagggacaagaaaaaccagctattgttagcctgttgtctcctcacaacagtcttccttcattgaatatttactttattttgttatagatttacacgtgggaacttaagagggagagaaagaggggaagaaagcaggggagacagacagacagacagacagacagacagacagacagacagctctctattattaggaaggtccccagaaaataagctacctcatttatcttttaatggaatcattgtctattgtgaaacttaactgacatgcagagaagtgctatatttgttagaatttaaccaattattttaaggcaaattatacccaagtcaaaaagtagtcctcttttaccttcctgtactgtcagaccttctccagaccccctcccaccccagcattaccccgagggtgacttctgtattagtcattttaatgctaattttcagcttcatcatatgaatatgactccatggtccattcgtattttgtccactttcattcttaattgaaatcagacacagtgttcagtcctatctagcttcattcacctagccttttacttgtgtgttttatcagtgtgactagggtgtagggatctataattcattaattttcattgttctgaagtagtcacaaacatgcaactaacagcatgctcatcctccattctttcactgacagccctctcagctgtttggacccctcagagcagcactggcatgtatcctgtattgtgggtacatgggcacatttctctacaatccctgcgatggaatcggtggattctaaatcgattgtaccttcggctttacttaacaatgctaaatgtcttccagactgatgcctctgctccacactgccaccagctgtgcctctcggagcccatcatattgccctagtcaccatgcttggaattgtcagatctttttagaagtggcattatcaggcaatgtctgcatttgaacctgtagctcgaattctctttggtcttaatagaaactcggcagtcagctatcaggaggtgaaagctgaaggatcagagaagtagagaaagcagatgctagagagttcttaccttaccaatgctcagacgaaaggggcgatcctgtccgatcctgtcctcagatgacctcctcagacttctctaagctcctgtctcctcccatcttatactcctctctctgcccagccatgtcactcctgtctccacctccctagtgctgggattaaaggtgtgtgaacccaagtgttgggattgcctttgtgtgaactctgtttttcttttagacagatccaatctcatgtagcccagggtggccttgaactcacagagatccatttgcctctgtctcccgagtgctgggattaaatgtgtgtgccaccactgcctggcctctgtgactgactagtggcttagctctgcattctgatcttcaggcaagttttatttgttagatcacatacaaagcatcactacatgaaccatttgttctgtgtgcaatgaaagtaagcctcaatattttccttgcagacttatagaaggaagagtagtatggagttaagggtgatgactttggatttggtttgtttgaacttgaggcctaaactcatagggttgctatgaatattaaatgtgtaattcacacagcattgagaataatgcctggcagataatgaggactgtgtaaatgttcatgattattgtgatgactaagacaaaagaatgtctgggatcaaatgttggtaaaaattaatgatgtactgaaaggaaaataaaattatttattgatgcaacaattgaagactcagtataacagagagtgcaaggcagagttcattactgaggaggaaagggggtatgcaaagtagaagcctcaacatggcaggtgctatggtagacctgaggtaggataggaagacagggaaatgatggggacgtgagaagggtcaggaacctgtcacctggagtgttgttaaatcatctctccagctgagaagcaagtacctcagcacactgttggacatggaactaatattgttttcatatttaaatgcattttgttaaagtagcaataacttatgccaaaggcccaacggtatgtcactttgggtggtacctcattttgttccccaaacattgcctgagaatctcatacagaactctttacaataaagacacctaacctctgtgtccctgtgagttagaatttttataggatttagtcctaccaggtgcccctcaagagaaaacaggtgataagatagtatgtgatctgaataagaatgtcccccttatatctgaatgcttggtctccagttggcagaactgtttgggaaggactaggaactatggccttattgtagaagatgtatctctgggagtgggtttgaggtttcaaaaccccatgccattgtcattcccagttagctcactctgcctcctgcttgtggatcaaattgtgagctctcagctatggatccagtgccatgcctgcctgccgcctatgctctccagccttgatggtcatttacccaccctctgaaaccatgagcactaataaactctgtggtgagtgccttggtagtggtatctcttcacagcaatagaaaagttactaagccagttagtaataaaatctccaactgtgcttcctaagcaggctagtcttaacattcttttctgtgtcttagccaggaatcctgtttcagactgaggcaaggcccctacaactctagggaaatgcctcaagctgctgaaagtgacagtggggtgttatatatgtaccttaaaatgttcccagattcatgcacagagagaagctgtgaattcaaaactgataacaagggatgagagtgaagagagctttatattgacaatagttgtggagaggggcatcacagtttcaataggagttcaaaagcataaatatgggagaaaggatattccaaccagagatataaaactctgaggaaacagttactgaagtgtgttcgaagagagtctaaatggaggccttagactcgaagtaagtatttaagctgtcttctcaaagatcttagcaggcggaagaaaatgagtttcagcttagaatctaaaggaagcgatttattcctgatctgacagggcataaaactaactacagttttaatcggaataccctagattgtgatagggtaaagataagctgtgaggtgtggatttaactggaaggaaaaggagaaaatattagtgtctaaccaaatctaagtatctccgagtaactaagactaagtgtgttggctttgttttcaagtggctgtggggtccttcctggctctgcttcttctgtcttctcatatttaaatcaacaagagcaggaagaactctctttcccataagaacccattctctgttttccagatagataaatgcacagtggcaaaacccttgcaaggcccctttgtatagaagaccacctaataggtgattaaactaaccaggccaaaaaaaaaaaaaagtggagactattaaataggaacaggggagtgatgtgatcatatttggccatcaagatggtttgtggggggctgcaatggaggtggtgaaggctgaaggtgatgacaagggtacacttgagcatttgggaggctgatgacgtcatgggcccagataggaaacacagacggattgaacaggtttggggccagatgagtttcaattggacacgctgagtttgtggtcctggcactctatctctacagaaaggttgaccaggcagatggatgagcaggtctgtaggaggcacaataccctgcacacagcatccccatcaatgtttattcaatacaaaataaacaaagacgaaaccagtttccatgttagcgttcccacagtgatatttactggttgggtccttgccgaagtgaggcttgaatatatccaacttaaaaataattgcttgccacttctgtgccctcccatatgtttctccttctactgcctaattcaatcttgtttttaaaaatcaaagatttttgagtgtttaaaactgtgactatccaaatgcactgttgccctaccttgacagtattagtaactggaaagacaagtcttatcaagaatatttgcaactctgggcagtagcaagggccatgaattggcatgatgtgcttccaacttcattgtgttatgactacgacctttggtcctctgtcttcaaagactttgtcctgccagaatatattagatagtggattcccacttgggtgttccagaaatacactcagtatatatgtggttgttcaaatagaagagagtagcttgtacacacacatcccatctcatgttgaattcatgtgtgtaagtttttttttttcaaagtccagctagaaatatctgttgaatctgatcgcatgttgatgctcacaaatcacatctttgcacagcatcctatggaaacatgcaccctgatctttcccactatattatctctggttacctcccaacccctgggaagacagacagtgtctcatgcatcttaggctccctcccctattccagttcagtgttttacatagaagacaactcaaattaagcacattaagcacatggtcaggccgggcgttggtggcgcatgcctttaatcccagcactcgggaggcagaggcaggcggatctctgtgagttgggagccagcctggtctccagaatgagtgctaggataggctccaaagctacacagagaaaccctatctcgaaaaacaaaagacaaacaaacaaaaacaagaaaacaaaaaaagcacatggtcaaaggtgtgtgtgtgtctgtctgtctgtctgtctctctgtgtgtgtgcatgttcgtgtgtactgagagctcagacacactgtgttccccatgctgaatgttcatctcacttctattttcattatgtagtacagcagggcgtcaccagaccaattacaaattgtgaccattcacggggtagagggataggggtaaacaatgccatgtatttctcccataataataagactaacatctgatcatgatgtttgttctttttctcatttgcactctgaaggattctctgctacttttgtaagttttcaagaaagagctctttcaccccaccccccaactctgctcatcgtagccaggtgctcacaacaccaccacacagggatctctgactcatgcttacaaaagtggagctgcataataggatctattctgctctgactaatttctcctcaacacatgttgactcattagaaattgtgagaagaaagttagcaaaagtcattgacttttattgcttcccttgcaggaaaaaaacccacacaccttttttcttctttataacaaattaattgcacactgggtaccatataattccacaaccccttcaagggtacctgcttggaaaaagcactccttttggaagtcataaaaattaatacatgggggaaaaatcttagcatgttgttatggcaggaagtagaggtgctctggtaggctgaggggcacttttgaagagaaatgggaagacgtcaatgaagagcaaagaataaccagggaggggtggggtgaggagggagagggggcttgagcacatggcggcttaaggttctgaggcgcatcaccctatcagtgtgacagagattgtagccattgggccttttacttgtacctttaatcaattgtcatttatggtattttgcttctggacagcactcctgtcttagggtggagagtggttcggggaaggctatggaaatgtggctctgccatttatccccttcaaagttcagttcaaactctgtttctctgcatcccattcacaccacctttagggctctttctcttccaccaatccacatggttcttctatctttaatgtgtagtaccatacaagcataccggaaaacaatggcttaaaaaataagccactttgtgcttttggtttgtgaactagggatttaagcagggctagtctctgctgtgtagcatcatctagaaacaagtctgctggggtaggaggacccaacatggcttcatcaaatgcctgctgcctcagctgagcagtctgggataactagaggatgcttcaacctcattatcagaactggtgatgaagcattttggtagagtagctcagattttgaacagaacaaaatggaaagttctcagtctctacagtcccatgtaatgagatgacatagtcagatttctgtcataacctctgggccaaaacatgtcataagtgtagcctatattcaagggaaaggaaaatggactccacgtcttgattcaaggagtggcatgcccagatagggaaggcagagtggtggcttccaatgttctttcagtgttgttagcttatcatataattagttgactatatcttttcctgtgtccttcccatggtcatggatcagactgtttgaacaaactaatggaactatgaaggctggaggcagtgaagaagttccccggggaggccagtggctatggaaacacataatacagatttgattcccatgtattcacaagtttcaaatgtacacctgagcctgtgtttctctgaagcttggatagtctgtccaattcagacagctattgttagaatgaacatattactcttccaattgtaagcatttaacatatggaaggagggggcaagtctcatcttgattttcttagccagaattcaggaggcagaggcaggcagatctgagttcaaggtcagcctgttctgcagagtgagttccagcatagtcagggctacacagagaaatcctgtgtcaaaaaacacaacaacaagctgggcgttggtggtgcatgcctttaatcccagcactaaggaggcagaggtgggtggatctttgtgagttcaaagccagcctggtctacagagtgagctccaggccaggttccaaaacaatacagagaaaccctgtcttgaaaaaccaaaagcaagcaagcaaacaaacaaaaaccacaacaatgacaaatttttctttactctcttaaatattcaaacacaaatatttcaacaaatctcatgatgcatttgagggaaaaggtatcacaattagagcaatattttaaacacagcctcattaaacaatgttgccacaatggtataagaacttagcagagtgctaagaaatggtagcattctcaggaagccttagacacaaatgggcatgtgcatatcaaactaagggtccagttgtaccagcagctgttgtcctatagggtcagccctcacaccttggctgacacatccttgaggacactcttgtctgttctgtccttagagtaccatggcaaaccataactaatgggtgcacactagaggacagagaagaaagtggagtgatgcttcatgtaaggtccttgatattataaagagcagaggaccatccgtcctcagcaaactctaactcagtcagcttcctgtgtgcgacgatacatagcaagccttggcctttctttatgcagtaactctacctcctcctggtcctggcttccatgtagactagctgttctgggtcagccctttcactattctgaaattaactttcaggtgaaacaccttatcttggaacacaaattcaaaaatatcagtataatactttaactgtagtacaaagggcaatgaagaggaggtgtttttagaacaaaataaagtgtcttagtgtgtaaatgtgtgggccagctccactacaatgcaaataagaacagagtggaatgctagcacacacttcagatccagaaggttgatgttataaaatagcctttggcttgtatcactccatttaagttattttttcatgttttaaaaataaaggtgatatgaatgcataataaatatatatcatagaattcaataatgcctagtactcaagtatatatgtgtgtgtttatgtatgtatgcatactttgtatatttatgagtacattctatgtatatagtataaaaatagacaaatcactcttattacttacagttccaattagatgaatagtaacacatggcaatttcacctagaaaattcagtgcatattacaaccacagaaaattacttgatgtttttatattaaagcaagtaaggatctccatgtggattaccataaacaattattttaattacatgattggctactcaaactaaaatgtctgagacttgaaaattcacttaagatagaaaagtccttcagtgtgtaggactgtcagcccattgcaagacatactgaaccctcaagccctactgagtgctccccaaataatggacatccacagacaccataactcccccccactcagggctgtgcttctaatgaattccttatacacatggttagtttctaaagcccttcctactttctttccttccttccttccttccttccttccttcctccctccctccctccctccctccctttcttttttcttccttcttttgttccttccctcattccatcttttgttccttcctttcttcttttctctcttccttactgcacaaataaataggcttgtaaaggttaagtgcacatgcatgttgtatttgatgatgtcaagccatacatatgttgtcatatttagtttaaagttctgcctcatgcctacactttatgaaagaatgaagattggaggaggaaggaacgagtggcggagtatagaagaactcaggacagtggaagtattatgtgtgagagcaccatggcagatagatttccttattgagacaaacctataataatacacagcagtgaattcacaagagtgaatcccagggcatggggctgactccccaggcttatgaggtgtcataattgtgattatgaggtgtcatcagttgtgacaaatgtgctgttctagtgaggaatgtggattgtagaaaggtttgtttttttgggggggtgggtggcatatggaataggggaactctccataccttactgtccagttttgctgtgaatctaaatgtcctctagacagtaaagtctatttttaaaaaacttttattgattcttggtagatatcacatcatgctttccaatcccactcatctccccctccctttgtatccaccctctgcccttgcaacctcccccgaaaacaaaaccagatttaacagaataactgaaaaccaagccaaccaagtcaaaccaaccaaacaaacaaaacttaaaaagtaaaggagaagagtcttgtcttggaagctgtaacatggcctgttgaatcacatagtttatcctttagtccactcatctttacttgccagtgttcattgcaatgaggcgttggtctggctccagacctctggcttctgctacaacactgataatgggctcctcttggatatcctgttgttgtcctgtgccatggagatcctgcagttttggatctgtaggttcattctctgcacctgctgcagcagttcatagatgaggcagatgttggggtagcttaactcatagccctagttctgggcctgggttagctgggttggttagtctgccagctttccctcatcatcactatcagggcaagctctccagcactgccttggctagctcccccaatgcagcctgtagtgaggaacagggactccctttatttttaaagtgatattagcttgtttctgtgtagaagggcctacttcagggatgctgagtcagaactgtagagattaggaattgctggctcagagccagagacacatagtcctcagtctatgatgtctttgtcttcctcacttccatttcatctggtctcctcattttcactcacctctagggatggccatggctattttcacttgaagttagtgagaagtgcaaaggccttgatgaaggtaagatgccttggtctccttgactggaccgtgccagttgataccgtgagtacttggattagtgcctcacactcgaaaggccataaatggcagttattactacagaaacatttgcaataaacacaggcttatgagggtggtggcggagctggtcatgactggctttctgtatggtagcagtttattttgatcacctacagtttgccactctgttctagaacatgctttgtatacaaagcaagctttgcactgaaggattttttcagtgctttttgggaaaggatcagggtcaaagaaatcacacacacacacacacacacacacagagagagagagagagagnnnnnnnnnnnnnnnnnnnnnnnnnnnnnnnnnnnnnnnnnnnnnnnnnnnnnnnnnnnnnnnnnnnnnnnnnnnnnnnnnnnnnnnnnnnnnnnnnnnnnnnnnnnnnnnnnnnnnnnnnnnnncaagcaggaagagagagagagagagagagagagaggagagattggtgtcttcaagagtggaaacctggagtcataaggcatccaaaattcctgtttctgacaagagcctccatcaacttaagaagaaatcacatagttgggaaaggctgaagtgactctgatgacatttgacagtgaaaatgaagacaggcccagaaggattaagagtcaagagaaaactattgtatcaataaaaccaccaggtggctttggggatgcagagctggtgactgtaggtgccaccaaaatggctgaacatgagagtcacctcaggagttttcaaggtaggttcagaggacccaggcttccttcctgaatcagaacttccatggataggcctggaacttttgtaaacttttcaaggtctgctgatcagttttgaccctcaccaatagcagctttagctacatgaatgttaaaaaatccaagtttctcagacctcttgcacttcaaatcttaaagcttggattctgcaacccgagtttttgcaaaccctgaattctgaatttaaattagagatacatggatcccttgcagggagaaacatgtcagcaacaaccaagagggtgaccaaatgtggtgtcaagagttcttgacactccccatttatttatttgtctatctatttatctttaattttcagagattctttcaatgttacatgtatgagcattttgcctgcatgtatgtatgtgtaccaggcacaagcctggtgctcattgagcccagaagggggaagtgggccccctgaccctggaggtacagatggttgtaaaacatggtgtgagtcctgggtgttgaaactggtcttcttgcatgaacagcaaatcttcttaattgccaggtcatctcgttcacctcactaccttttatttgattttactttattttattttttgcttcaagatttttagagaagattgggggagaaaaaagtggctttcttccttttcctttaaattatgctattaatatagcaccagccatgctagaaatacccagtgcattttcgcaacctcataacaacctgagagaaaggttgatactatctctctacccatgagaaaatactcctggagattttaaataatttgcccaaggtcacacagttaataagtcgctgagctgagacgtgagggaaagggtttttcacaccatgccagtctgcctctcacactactcatcctgtgtccaggacaatagaacagatggggaattcagaaacaatgaatgccagccgccttacatttgccccagaaatctaaggtccaggagtataaaggcagtgtggatcaatacaaatgtccaggctgattgggggtagaattgatggagccagtgtgagcttcagtattccagcctagggctctttccaaaatgccacactgagacttgttctcaaactgctgggatacttgttacataatgttcaaatttatgtaggaatgtgactaatccacattttttggtgtttgatcagatgtagaatataaatgaggcaagcacttaattgaaagactcaagcaatgagagggctggcgaaggctggagtacagacctacaatgaaatacaggctgtgtgaatattttctagtctgttatggatatgaactatagtttaccacatctgtggagatcagttccatattacgactaaacagttgcagagctgtgtggcattcatgtctgattgagtagaggatttggtaattactaatcttcccagctaatagcttcatgtgctagtcaagcaaaaattcaatgtttgatgtatccctacctgtctccaaacaactgtgtgctgttcggcaaaacagcgatcaaagcaatctgttcatcacttcagagtttctctcttttaagaagtcattatttaaaattcggtttttttttcttttgctatagaaaagatagcaaagatagcaatgaatagaacttactttcttaagaaacacctgtcatttgaagaagcacaaagacttgtagaagggaaatacatattttagtcacagttttgtgtcctcttaattataattatctcagagctctggtgtaaaaatatagaagattttactaaaatagatgaaacagatctctcaccgatgctgctaaagccctctttaatgtatgattatgctgaactgcttttagttgttagaccataatcatcaaaatgggaaactgttgtggtgtctacgttattgtcattgacctgaaactttcaaaggctaataatctatatgatcagtttattaaagcaagttttcaggctccaagttgatgtcctcatggagtagaagaatgcactgtggtgtggccccacgagtttgctggtgactatgcactgtatgtttctatgtgacaccttcttgctctgcagtcttcttactctgagactgtcctggattctgctgtcttcatctttgggctgaccagagaacagataggttttagagcattttagacagtcacattggtaccactctgttccagtaattgaagacctggacagataacaggactttgaaaattgcaacatggatgaaactattgggagggtttctgggaaaagaataaatggctcattttctgcctctgacgcttctggccctgaggcaagtcagccttaggaaaaaggtaacctgtccaaatggacagaaataaggaagtcgcatagaggagggccagaagtggccttttctgctgtatccagagccatcccacctttgtctttcctgcttattgagaaaattagttccctcatggactcagtcaggcatggtctgcaaacctctctgctcctcagaaccacctgaagggatgtgaaagccaagcttctgtctgaccctacccagagacttgattggtgtggtcaagaaggggagtctgcctttcaaaagaccccagataattcaatttttccattttaaaattatattttatttatttacctatctatcttcatgtgtataggtgtgtgggcatatgcataccacagcttgtgtggggaggtcagaggacaactgacaaatgagtttcagtcatgcagatcctggagatccaactcaagtcatcagcttggcagcaagtgtttttactgaccaagtcctctctttggcccaggatcccagctggttcagacttcgctgatctaatggttatatctggataatcactgatgtagattcatttgtgtcaagaaatgtcaatggcttggagtgtcagaacatctcaatttatatgcgtaggtgctgagaaacacatgaagatgcaaacactctgccttttgggaagcctaatttaccttaagttgaccagaaagaaacattctttccttgtatttcttttctattaataatgataatctattaaaaacatactgataaaatccataaagcacagcatgtttttttttttttttttttttttggataaacaacaaaggtcttggagtcagagagtcctgtgttacacaagagccctataacactctgtacgtataaattgcttataatctcatgttttctgatttgtaagtgggaagtaaaactttcctctcagggtttatattataagaaatagaatataaaatacttctagcatagtacttagtgtatgataaatgctgaaggtctatgtgattgtgtatatataattatatactttaataactagtatatgattatgtatataatatgctacatatatgtaaggtaagtacttgcatagtatacttgcatagtatgcacatatatgttttcttgttagtctcctaactaccttagtatgacataaaaatagggagtcctcattcaagactttatctagaaatcttatacttagcaaattgtcaacagaaacggagttttaaaatacaaatgtccttgacaataaacctaaacttcctatagtgcccattttaaacatccctctctattaagaagcatttctacatagccatcatatttgtgaatctgagtctatttcagacagtgaatcctgaacatctggtagtaaaactcaattgcaaattgaggctaaaacatcttaaaaatgatctgagattttgaaaagttaaataatgttggaaaatttgcccgattatactccaagtccttggtaaatcaggacatggcagaaggagaaaaatggatgatttgaagtgtcaggtgcagccccttagtccccacagtcaggagaaggacaggagagctgccaggtggctgaagccagcctgttctacacagagttacagaccaagattgtcacagccaggctcatggaagactgcagcaaggccatgtctcctggatatggcaggacctgagcacacctccgcccacagttatgtttgtcaggtcaagccagtcggcattctagcatggagtgggaagggggctcttgggcctctatctgtagcagataggttctgggagagggagagttagttttccttaagagagggggctcccggtaggtcaactttgtcccaccagcacatggccccaaacacataagtatatgatgggcaacacagattggacacaacggttattgaattaaaaacagagacaggaagttgaagttggaggtgggtagagaaattgaggtagagctgggaggagcttaggaaaggagttaggggtgaacatgatcaaagtatcctgtaccgaattctcaaagaactaacgaaaactttaaaaagaaactgttctaagaaataagaacacatacacaaatattaaattaacttttatttatttcttttacttcctggtcacagtttcccctccctcctctcctccgagtccttgccccccatctctcccccacctccatcctctcctcctcatttctgtttaggaaagcgcaggtctctcacgagtatcaagaaaacatggagtatctagttgcagtaagactaagcatctcctcgtgtattaaagctgggcaaggcaacccagtatgaggagtagggtcccaaaagcctgtcagagagttggagacagtttctgttcccactgttaggagtcccatgagaggaccaagtcacacaattgtgacatatgtgcaaagggcctaggtcaatcccatgtaggctccatgtcggttcagtctctgtgagctgctaggagcccagttgattttgtgagatttcttgtgtccttggcccctctggctcccgcaatcatttctcccgatcttctgcacaattccccaagatccacctaaaattaaaaaaaaaaaaaaattctggaactttggtgtgagaaagacttgttaatagaaatggtttgactgtcaaaagtctaagagtgattctgataaaaatagtatctattttcaaaccgactccccctgccccatgatcatgtagcaaaagacaagcagaaaaatcatattgttttcccaatagattggcatcacattaagtaatcagtacttaatttattcttgaaatcagcaatggataactggtataataatttacatttgttagaatttaaaaactaaaataaataccttctcaaagtgtttgtctcatttttcaaggtaaaattctatttacgcgattcaacaccatttactctaaaacttaggtctgaactgtacatgcactcgcatttcctaggaaacagaaatcaagataatagctgagtgttcaccagctctgtgctggcctgatcagtttagtcatcatcctccctagagtttgtatctgcaggaaacaactggtaagtaggggaaggtgttctgtgtggatttcagtgaaagtgcttaagaggggaggtgtggcttgtttctctccctcctccatcctgccatttgggatgaaggcaggagctccatagacagctgtcattgacaatgaggtaagagacacaaaggaaggtagtggaaaagaatattaggcttcaggaacctcaatctcactatgacactcacattttagaatccagacatttgttttgagaatttgttatatatcagaaaactagataataaatatgccaataaaatttttcttttagagttttggcgaataattgcatttaagttctctctctctctctctctctctctctctctctctctctctctctttctctctccccgtgtgttttgtgtgtgtgtgtgtgtgtgtgtgtgtgtgtgtgtgtgtgtattcatgcatgccatggtgttctgttggaggtcaaaggagacagttctgtcttcccaaaggatggaagatgtggagggggaagttgtctcattttgatgttcagtaaaatgacacaaaacaaggcagcctgctcagttgcttcctacctgatttagttctgagattaatataccacataagcacctcccatcggctcctgttttgtcgaatccatggggtttagctaagaatttttaaaattatttaatgcaacgtctgattatttcaggaatcctgcacatactattccatgagatgattgtctggcctctgttttttagtgagaaagtgttgaggataggagtccctcctttatgggagggacttcttgatttgaacctttctaacatgttgccttcagcgtgtctgcctttagtcaagtcttctattaacagttctttccatccctcttctttttatgtgattcctagactacaccactgctcagtgtcatgctatccctgctccccagcagcctctgtgctaggacttgaacctagagccatgctcatactgggcaagtactctatcactaagctatgcctccaaccctctgatacatcaagattctcaacaaacgattttgttttggcaaaactggattgcattgtttttagtgttaatgggaaacaaagggcatggtctgctctaaatatgctttgagcagttcatagctgtggtcttttcccactgagacctccttctcctctcacaaggcagaaactcaccagtttcctcatcttttcttttaaaacctctttaaaatatccaatcactctcaaatagtaacccaaactaccctgccccagccccagggagctccaggaaatatacaattctgtgaacaggatggaattttgagaaacattacaaagtgtttaatcccccagcctaaaatgagataagacctatgggtttaaaaaattaatcccattccccacagtgcctgtcacctgttggactcaatacaatacttaagagctgactgacctttttctggggtaggtagagtagaccccaagatgaatctggagatggcaaaattgatcattgtcaaataaatgggcaatgaagaagcaactaaataaatattgcaccaagccactagtttcttgtccctcccccccacacacaccatacacaccccagctgggaaagccacctgcaacttgcagtgtttcccagctgtttaaatagaagtatctctggacagccccgggctctcttatctctttcacagatatctgcctccttttggttctgggatttaatcctctcttgatcactatcttacccctcagcccttctgatccgcattgacagtgtaaatgtcactttgaaataactgtccctgctgtttagctggaggagacttacacaggtggtgctgtcacaggagttggcattgggctatgtgagttcacattatacagcataaggtcaatgggtaagtaactgcttcattcatcttgtaagaaatattttataccaggagaaaataaaaagcaactaatcttgtcttgcgtctccctattcattttttccaggattgtaaaatccacattacatcatgaggttaaggggccctgggtagcaacttaaaagttaagtgctctgctgttgcttcatttgcttgtgcttgctctaccctggggcagcgtggagatgcccaaagcttccagatccttactgttgtctaatcagcaccccccccccattttgtatcattttcacagtccctctccaaataactaacgttagcaaatcctcctctgtggacacacccacaagctatgtgttccacagttttacagcatcacttacagatggtaaaatggtgcctggctttctgcacaagactgagaactaaaggcaacaactggatggtcagtcctggctgccgttctgttcattccatgccttgctcaacttttagtgtagcatcgtctcatggattttgcattgtaagttttctttccctttctctgaaagggttgaggtagaaaaggataaacgaacaagaccatattgtctgcgacttaccttgggttccaaaagcatgacataaaagggctgaggtatattttgaagccactgtcaactgtcacattctaaaaccaggtgatttgggtggtgcaatattgcattttaagtagagccaaaaaggaatacagattaaacacctcctcctccataatgtggcttgcctgcatccttcaaagaagggggaagggtctgatccttagacaggtaccctgcagctctgggagacatctgtaagaggaatccattccttgttgttgttaaagcacatatcaccctggagctttccaagaatacaatgtggtctatatagtagagtggataaggaaaaatcaaactgcccacgataggcccagtgttattgccaagacgttcagtgtgagtaagggaaaactgagacgaaggtctgtcttcatgctgctcaaaaggcaacgctcccttcagacccaaccagcatcaccaagacctgtgagaccttgcccttcaaccagttccaaagattgtcattgaaaacttgtgtttcattctgtccttgtttagtggggccaataaagtctcagcaaatgatgttggcctgttctcttgggcctgctcagacctgggatcccagattctgagttcttgagtgaaatgtcacaagatggagttgcagctcccttgttctccaagcatgtaatttgcttcatgaaagctggaaaacaaaagcgaaacaatccttccacttcttaactctgaaaaatgctttttaaaacaataacatctaatgaaatgccacattacctctgtgttgaataagctggtttagtcaggaaaggcatttcctttgaagtagctaatagatgtgccgcctgtaacgtgttggtaaaaatctacagagaacaataatctgatgtcatgtagtaggggtggggtggattggagtggtggtggggactagtaagatccatgtccctgggagccattctgaggcattcaggagttcttaagtatacagagtacatgtgagtcaacaagtagacaaagaaaaacccagacctttgatgacccctggtgaataaactaagcactgcattgcaatgcagccagagccacgggtttcagagcagtagcccctagctgcttcggctctccagaaaccagagggatattttccctgagtgcctgttttttcttggactgaggacgttccttatggacttgggcacctgcatgcctctaaacaactctcactttggtgatctctgtcagtagagatgaaatgtgtgcgcatgcactgttttccctctcagcacgagcagtgttatttataggacgccagagaattcagtggcctccctaaagccagatctccaactcactttcacgttacagtgtgcttttataccgtttggcgtaagagttatgaagagtcaatcatcattcttctgtaacccaaattaaagtcaggattgagaagtagccccttgtctctaactcccgagtgcaagctgaaacagctctctcgtgcagtaaatctggatttttgtaaacagctgtgtgtgaccagcatggggtacttgtgagccagaaaacagactttattttgtcagcttgcaggagatggatgaagtttgttatctaaaagaagaatggaaggaaaaatgcatgaatttttactgtatactccaggcacccaatcacaaaagtggcaatgccaagcacccatttgtaagcattcagaatggggtggccataaaatggaatagaatcattacaaattatcctatgaatgcagcttagcagtcagtgtgcaccataattactggcatttatggttttgaatcttggattagatttttttttccaggagagcattttgctgtgtagcaggctatcctagaactcactctgtagattaggctggcctctgcctcctgagtgctgggtttaaaggtatgtgtttctacaccagctcagatgagcttttaaaactatctctcagactggtattctcattactgggccatcagagttttgttctctcttcctttttaattaccataaattaaagaatgctttgctctcaaacaaaagcaacttaagtgttaaaaataaaacactgtcccaagcatagaataactactgtggtcaccccacagggattactgggctgatgtggagaggggtatttgtttccttgtatgattttttttaacatagctgtaaaaagtagttattatccatgagattgaggaagtgggcagcctgagattttagtcaacccaacagaggttcacaattttaaatatggaattttagaagttgcctagttccattgctaaaatacctgaagcctagactgaggcaatacttctaatatggaatagcaaaacatgcacctgttgctttcaggtctcgatttctgccatccttgtcactggcccccctcaagcacactgaatatgtgcatctttgtagagatcattgtgtcactcttcagagtctagagtaaattgttgggtaccaagagaagggaagagagaaaatatgaaacaatgataagaatttgagaaacaacccgaagtggaatcaatctatggaatcactaatatttctctttcaaatgaacaaaatcggttttgattttaataacagaatctatctgtgcatactacttcattgtgtcttagtggcaaatgatttagaatgctttttaaggcttgtcaagaattactattgccaatttttattgtctactgtgaagttgaaggacaaattatgaaggctttctatagtacccattttttaagtatttccagaggcattgcatttaaaaaaaattatgtcatgcttgacgtccactcatccctcacatgtatgtgaagtatgtctcctgactgagcaaatctagctttaaaaagtctctccctgaataatgacagctgttcaatagggcagagaagtagctttgcataaaggattggaagccatttccaaaatgccttcaaactcaaagccaccaagagttgtgagagactatccaacagcccagactcaaataatcttcctttcaaagattagctggacctgtgtacatccttgtaatcaaatcaagagctgcccgcagtgtccatccatacagcctgtttggaggtagtggagctggatggggaaagctctataaacctgaaacattgacttgcatacaacttctctccctttctagctagacagattattttgagcagaccacaggggtcctaaggatgcctgcatgtgtagtcctctgtgagtgtgacctcatgttccatggacctgttctgtggtagtgatgtggtgggctgtagttcagaattaagaaccagagataagtgcagagctcattacaatgtccaaccagtagcatcttcatcttcattttcatttttatcttctacccccagggtcaagcatgattcaactgccatacaatgcagagctggctgaagcctggtgattgcagacccagaactctgaatcctctctgttgtctaaacaagtctttgaggtgcttgggcatttggtaaatatgtgtggggctggggctggggctggggaacaattacatagcaaatgtgtgatcctagattttcttcttaaaaggtcagggttaggttcaaataattaattcaagaaatactgataggaacagcccagcttgaaacttgcattctttatatactgtgctaaggaaaattaataatgcgcctaatagattaaagaagtagcacttcctgggttgaaaaaagaaaacaacaaaagcaaaacccgagtcataggagtgtgattaacatcattctcagcagtttaccctgccttggaggattgcatcagatcctgggggttttacaggtctgaaaattgagtccaaggacaatgtggcttgaatatgacatgagacaaaacctctatgtagatggaccctgaaaaccaaaatttgactaagtttttatgagtggccacatttctttatttgtggttcatgcccatgttcatccatgtaagagtcttctttattttccattatttatttctcatcctttatctctaatccctcttattacttcaaaaaatgcctattctcatacatattaaataaaatgctgtgtagatcagcatggggtgcaatgagatgcatgaacaatttcaaagtatgttcatttgtattgcattgatagcaaaggtctacccattattatgggtaagtttgtgttgtgtgtatgtgtagggcaggggaacaaaaacattatctattccctttctgtttcctgggaagttggttaggattctaaagaaagtcgagttaagtttaagatgtggagcactgtcaaacttacacatgaatcggagattcctaagagcttgttacaacggaggagactggggtctttgccattggctctgtgtaagtatagattgaggccagagattttgtgtgtgtgtgtgtgtgtgtgtgtgtgtgtgtgtgtgtgtgtgtgtgtgtgtgagagagagagagagagagagagagagagagagagagagagagagggagatctgtgtgatatgtatatgtatacatggatagcacagcacgaatgtggaacccagaggacaacctctggtgttggctcttgccttctactttggtggaaacaggttctctttgttgtttacctgcagagtataactgacctgaattcctcacagagccaataatagagaagaaagggaaaaatgaagggacatattctatgagagatataggcatgtaattcataaacatacagtccttgactaggtcttggtttgatgtttggaggtccatcaggggaaattaactatagattgaatagtaggtaattaaatttttacatgtgtggtggtttgaatgagaatggccctcagagactctcatttgaatacttggttcccagttggtggacctgattgggaatgatcagaaggtgtggcccttttggaggaggtgtgtcactgggggtgagcttcctgccatttgccatgtgctatctgtctcctgcttgtggatcaagatgtaagtctcagatgtccctgtcgccatgcctttgttctgccatcatgagccctcaccctctgaaggtgtaagccccaaattaaatgctttcttttataaattgccttagcgcagatgttttatcacagcaatagaaaagtagctaagacaaggtatcatgatgccattggaattatttaggagaatatccttgatttttaggaatggaacctaaaagagttgaatgatgtgtattgttgcctataattaatgtctaagcagattagcaaaagattatatagttgaattgtagataaatatgtagatgatagataaaatttgtggaataaaatagattaaaaactatggttagttaagaatacaattgatcattttatgatttttctacttttcagtttacttgaggtattttcaataatgcaaaaagtcttccattttaaaatagagtttttacttacattctatacataccaaatacatatattaacatatttatgcaggcaccaatcacaaattttagatgtttaaaatattgattctcttctttatactaaaataaaaagaacaaatcatatccttggctctgctaaagttctttttttagatgaagtgaagtttaaacacacacacacacacacacacacacacacacacacacacacacacacacatattaatacaagcaaacaaacttcccatcccacactttcttccaccccatgcctctaattgatttacttggcttctctttgttgtatcaacagagagagccttcagtttttaattcactctggatagtgccaaagacattttgcacttattcaaatcataaggtcaaagagagaaagtgagagagagaacatgcaatgagaagacagatggagtggggaagagagaggagacagatgggcctctctcagaacaagcaatagagccatataataacatgtgaagataattcaaggagaatgttaaaatgctaagagcttggctgccccagtttctggaatatgaccaaaggtggccacctagactcaccctaatttaactaaattctgcttttttatgctttagggaaggtcactttggtctgtctgcatccaggcaggacaaggtcatctagttattttcatctatgtctggcttgaggaatatggaattagccactaattcaacaaatatttatcaatctccactctatgctagacactcttctcaaagaaaacatataaaaatcactgactttatagacagataatcaacaataataaagtcagcccagtaagagatgggtttcaatttaaaaatgattgttgtagttggatcccactgaggcaagccaattggagggaagtctcagagagtgattgagtcaactgtgttgatgatatatagggataacaagcaggttgagtggcacatacaaaggccccacagcaacaatgtgtctagctagtcccaggaatggagtcataggtgagtgggtgtaggaattaaatagagggaaatgatgggacatgaggtcagaagttgtgttggcctctaaagaatgagaagtcaaggcaataatccaaaatgaagagaagcatgtggtctgacttctgtcattgatagatgactctgttctctgagctgcacatagactgtaacaggcgaggtagaaatagagctaatgctgaagctgctctaggtatcaagaatggagatggttgttcggatcaaggcaaaatcaataggcagactttggagaagtttttaaaaatacatttggctttctaattctcagtgtcaaaaataaatgtgttcatctgaagtagcccttatctaaaatgtaagtaagttgtattatgaattattatggaatgaattatcttgtgtgtctttacatagtgacttcagggaacaaggtaataggttatatttttgagactgatggaataggagtaaaatacagacagtaagtttctaaatccaaaaggaaggttgggacctagctatattttatgtcagctcaatatgaaaataattttgatagtctgctctagctgagtaactaattttttaacctcagaaaccaacctgttcttggtgcttcaaggcctctttagtgatagccattttaaaaaaaatattagacctcatgcagcagtgatggtggggtgtgaagatgggtagggtggaagaaggctatgggggatgttttaaagaaagaaagatagaccatagttatataaagaagggaaaggagaataatagaacaggttaaatagggtgggggcaatggaagggaaaggtagaggagagagtatgggcagggttaactaacactaaagaccttatgaaagaatcatgtcaaaaacaaaaccctccagaatcatcttaaatataaacttagatacaatgagaagtttatagaacagggcatcaatgtccttactaaatgccagaggctaacaaataaaaaaagcacaatatcaggaatgggtgtcctctaattgcagttgttggtcagtaaggtcctatagagccacaaacattactggctaatgccattgccctaactgctttacagattctgttgctgaagacatcacatatttgaatcattaaaacatggagaaactaagctgatatttaccgagatgcttcatttctactggatagctttcatagttctggaaggtgctatgcatattaccagaggataaaagtatttatcaatcttatccagctgtgatctgcaagttacaataacaactggcccagtcaagacacgcccactgatgcaagagcggcacaaatgctatgcaagtaaccaaccactttttgattggtttggaggcaggctccacaagatggaatgcacaccagcacaattattggggctgagaatttgagaatatgaggttagacagatcataaatcctagggtagaacccattactcttactctgtgaatgggttgaagtattaaactgattcctaacaacttctcattatactaatggattagtgcatttttcaaatgttaccagagaagctgctttctgtagtagagggtgactccacaactggtcactgtacaaggaataaatgactgcagaatgctcagccctaaatgagacatctatatcatatccgcttgtcccaatgattgggttcattgcaaaagatggatcagaaacactgtaagaataaaaagacaggatgactacaaggacacagtgttttccagagacaacacaacagttcttcagatgaactctgttgtgataagcatgcacaagacctgaataaattcaatccatacaaaatctcatgattgagatgtaaaattgggcatgaagtttgaggcctagctgaggcgattttggcagccgataactaatagaagggataaaatcagttttctttaaggggtgatccttgatagttctagcacacttcagtggaaggccacatggagattattgcatgggcaatactaagttgactccatgggtgagtttaaaaataaaacaaaacagaaaataaggacataaagttggacgggtaagatatgggtgtgaacctgggaggagatggcggagggatgaatgtgatcaaaatataatgtatggaatcctcaaagacttaataaataaaaatacttttaaataaataaaatcattgaaatgttagacatcttattcttatgagcaaaagtatcaggtaaaactaaatttaaaattattttaaagtcagggttttgacatgactcaggaataaaacctggagaatgtacagttgtgtaagtcatggcatcagctattgttatctgtcctctcaattaagctctcttgcaaagtccttttattggatattctcaatcttttttatttctaaatgaattttgtaccaaaaggggaaagaattctcttgagattttgataccaatttcattaaatctaaaaaaaaaacaagttatggagaagcaatatcttaacaagcagaggtcttaacccacagataatttaatctttcatgcctcataataatgttttataatttcaatgtacacaccttgcgcatattttcaattatcccttattacttttcatgttgatgttattataaatggaattattattaaattctacttataatcatttgaggctgatacatagaaatatagtacattatttaattctttcagatatcctgaaactgtcacatagttgttccaggaggcttttctttttcaaagaatcccagatttttcaacatagattgtttatcagctgcgaataaaagggttttacttctttcttgccagtcagatgcattttgtttctttttactgccctcctgcatagattagaaccattggtacactattgagaagaaaagatgacaatgtacatcggtgtgctgatctacatctacattgagaggagagtaccatcaaagatgacattgggtgttaatttttcatagatgttcttcctattttgttgtgaagctccattttgtaaataaacaaatgaatgttcaacttttcaaatgattttttttttcatttactgaggtggttttatagtttttcatttcaaatttgcaaatataatgacgatcatattgattttcaaatgttaaatcaatgctacacagttctaataaactccatttgatcataaggttatttccccttttctgtgcagttggatttgatttgctaagctattgttcagattgacatttatattttgatagatatttatttatacagttttaattttgccttgttttctaggataactttggttttgatctcaaggaaatacttagctcatggaataggcctgaaattattccatccttcatcttcgtgtgtgtgtgtgtgtgtgtgtgtgtgtaacattggcattggttttctttttaaatgactgatagattcagtatgaactcatctaatcaatggaatctctccatgggaaggtctttaactataaactcaacttttatagttaatttaggacaatccctgttacctattcatgattgaaatttggttgttttttgtagcctgtgttttatttaagttgctgattttttagcatgaaatagaatcagtggtaacgtcctgtatattgttcccacctcacaatcccttcttttctgctttttagcctctgttagtcaggataaaattcatcaattttattgattgttttcaaatgattaatttttattatatggattttctccatgacattctagtttctgttttctatttcattgtttgatgtctcattattattatttcatttctttgggttttatttgcttttttcctattcctaaggttaaagctaggagctttgacttgaaacctttattttttccaacatcatgtttactattatagaatctctcccaagcattgatttaatctactgatacgttttgtaaagctgtgctttcattttcacttagttctaaagtgatttctaatttccctttgtagtggcttctgcttcttatacaatttgatagttttttatagttgtagtgtttaggccatttacaatttttatataaattagaaacaaccttgttttacacatcaatccctcccatctacccataccccccctccgacccccacatcccatcccccatacactccccagggaaggtgaggccttccatgatggatcatcaaaatttgtcaagtcatttggctcagggcctaggccatcccccctgtatctaggctaagagagtgtccctccatgggaaatgagctccggaagtccttttgtgcactagggatacatcctggttccagtgccagaggtccacagactgcccagtgcttccgactgacacccacgttcaggggccctggtttggtcctatgctggttcctcagctgtcagattggggtccatgagtttcccctttgctcaggtcaggtgtttctgtgggttttcccagcaaggtcttaactcctttttcgtcactcctccttctctacaactggattccaggagttcagctccatgtttagctgtgggtctctgcttctgcttccatcaggtactggatgaaggctctagggtggcatttaaggtagtcatcattctcattatatgggaagggcatttaaggtagcctctccactattgcttagattcctagttaggggtcatccttgtggatctctgtacaattccctagtgccagatttctctttaaacctatagtggcttcctctattgatgtgtcccctttcttggtctactctgttcgtctccccactcaatcatcctgatccctcatgttctcctcccccctcctcttctcccctcctctttctcctacttccctccccgcctcattctcccaatttgttcaggggctcttgtcccttttcccttcaccaggagaaccatgtatgtctcgagtacggtcctccttgcttccttgctcctctgaaggtatggattgtagtctggtaatccttggctcgatgtctaatatcaatatatgagtgaatacatgccatgtttgtctttctgtgactgggttacctcactcaggatggtttcttatagttccatccatttgcctgcaaatttcaagatttcattccccccccctgcctgctgagtagtattccattgtgtaaaatgtaccacattttctgtaaccattctttggttgaggggcatctagtttgcttccaggttctggctattacaaataatgctcctgtgaatgtagttgaacagatgtccttgtatgaatgtgcatcctttggatatatgcctaagagtggaattgctggatcttgaggtagactgagtcccattttctggagaaacctccatactgagttccaaagtggctgtacgagttgacactcccaccagcagtggaggagtgatccactttctccatatcctctctagcatgaactgtccttggtgtttttgattttagccattctggccggtgtaagatggtgcctcagagttgttttgatttgcatttccctgatggctaaggatattgagcactttcttaagtgtctttcagccattttagattcctccattgagaattctctatttagttctctaccccactttttaattggattatttgatgttttggtgagtattttcttgagtcctctgtatattttggaaatcagccctctgtcagatgtgaggttagtgaagatcttttcccatctttggactgccattttgtcttgttgactgtgtcttttgccttacagaagcttctcagtttcaagaggtcccatttatttactgtcaatctcagtgtcttgtgctactggcattatgctcaggaagtggtctcctgttccgattagttcaagggtacctcccactttctcatctaagaggttcagtgtggttggatttatgttgaggtatttgatccatttggactgaagttttgtatatggcaatagataatggatggatctatctgcagtcttctacatgtccacatccagtaatgccagcaccatttgttgaagatgctttcttccattatatagttttagctactttgtaaaaaatcaggtcttcataggtgtatggattaatatcaggatcttctattgaattccattggtctaggccatttacatttatgcaatgatcaatatgttaaggcttaaagctattgtttagtagtttgtcttctatttatcccatctattattctcttttcttgtaaattaatttttttattccactcactctcctttgtactttattatgtataacacttactacttcagttatctattaccttggggcttagaataaaaatctttaacttaagatgtgtggtggtagcacagaccttaaatctcagcactcgggaggcagaggcagaggcagaggcagaggcagaggcagaggcagaagcagaggcagaggcagaggcagaggcagaggctgaggctgaggcagaggcaggcagatctctgagttcaaggccagcctggtttacagagcaagttccaggacagtctctaaagctacacagagaaacctgtctcaaaaaaaccaaaatcaagccggtcgttggtggcacacacctttaatcccagcacttgggaggcagaggcaggcggatctctgtgagttcgaggccagccttgtctccagagtgagtgccaggataggctccaaagccacacagagaaaccctgtctcgaaaaaccaaaacaacaacaacaaaaacccaaaaaacccaaaaaacccccaaaaagaaaatcaaatccaaaaaaataaaataaaaaaataaaaaaacccaaaacaaaacaaaacaatatgtctttaacttaactgactaggcatttcaatgatcttatactatttactatagatgagtcttataattatatacttccatctctacctttctaacctacattatcaaattttatctacagtggtacaaattcatagcatgttgtcaattatagtttatgtgtgtatataggtgtatatgtatttccataagaagcccagaggccaaaattgtgggtcttcctcaaatgcttttccacccaattttatgggacagattctctcattgaatatggagctcactggttgcctaggctggagatttgaactcaggttctcatgcttgagaggcaagcactttatcaatgaagccatcttcccagccctttctattgtcctttgaagtaattaaaataatgagaaaatatcacagtgaaccatgattttactgtttctgctcttcattccagtgggtagaactcaataccaactgtagatactttgaaaatgattcatatcttagtggttcttggttaatcttctaaaatttctttttctctatttttagtgtagatagtttttacttatagacttgtagctttgttgattgtttcattttataatgcctaacttgatattaatcctatccagcacatttcttgtctgaggcacttacagcttacatctctaaaagtttaatttgggttattttatatcttttatgtctgtgataattttttaaacctctagatacatataataactgttttctccattaattctaacattagtgtcacttcttaattggtttttatgggttgttttttctctttattacatactgtgttttctttctattcttcataatctgatcctatgccagacttcttcatttctacttcatcgagtgttgaatgttttcatctgtgatgcagtcaattactttgggattcatttgatcttcttagatcttgcttttatgattttctttttaggtgggataggagcaatatttggtttaggtatgactgttgcccactagaggtaaatctttggggtattctgccaactagaggtaaacctttggggtattctgcccactagaagtaaacctttggggtattctgcccagtgctgtgtatactgcttggttgtcatgtagctgtggaactagtcagggttcctgaccctatgagagtgccagttctatactgtttggtcctctcatttggctctttcccagccccagacggattcttcatcaacataccccaaacaatatgctattgtgttcccagaatgtgcttttatggcagtggttttcaaccttcctaatgttgcaaccctttaatacagctgtttatgttgtggtgacccctaaaattattttgttactactccatgactgtaattttgctactgttatgaatcctaatataattatctgatatacaggatattttgacccctgtgaaagggttgattcacttccatagagctcatgtaccaatggttgagaaccgctcttctatgggataccagaagtcttttacgaacagctgtcccttctggcactcatttctgaaaactaaccaaaaaggtttctgcagattttcaactctgcctcggttcctagaaggaatcttcaagcttctgtctggatcatttatgatcagacttcctcacactgtggtaacccccatccataaaattatttcattgctacatcataactgtaactttgttgctgttatgaatcatgatgtaaatatctgatatgcaggatagctgatatttgacccccacaagggatcatgacccacagattgaaaagcactggtttagatgtttgattattttagttgggaaataactcaccataatatttaatttgggctccaaatagctgtccttgggctgtacattctgtgatgttggagtcaaggggggggctttgtttagaaatcacagagctcgatttgtatatttttgtctttggcagcatggaaactggtagaacacttgataattctttattgaataatacagttggggattaaagcagtgaatttccccttgtctagatagctttctttaaaataaagttgtccttgggtattagtgtctagcaacctgtttttaacaacttaatagctaccagtcactggaagttgtttgttaaatgtgggacactttgctgaacatatttatatattttcttatttaatatttgtatcactccaacaaataatctgtagcttaaatatcctggatgaagttgagaaatcttcataaagaccaaaagccctcaaatggataggaacctggattttgatgaattgaacctcttcctttccccagtgtggtccacaggacaatattagcacattttcagtctctggactggctaaatccaatcctgtatttcaacaaggtcagcacataatttgcatgaatattcaaatttagtagccttattccagtctatgttcaacctgttcttcccatcggctggctgagagaaggacataaagggaggtgagcctcccagcagacaagataacctaaggatgaagtgttcatagcttaggcaaggttggggtacagttggagacatgctgagcagtcagatgaagtgatgaaaaccattttacacattgtgcctcccgtgcttcaggaactgttccaaaaggcttattgatgttagcacaaccctcacaatcaacccagccattttctcttcattctacaaatgaggaatagggaacctgagagcttaaatggcttctacaattcaattagtgacagaatgcaagatgacctcaagcagtgtgactgcagagtctaaatttctaggtcatgtataccacaccacacaacatcaggaagtagcagagcctggggagtggcgtggggaggacaatagacaatgggaatgaggaggacaactatgatgatgaaaatgctgacaaaacaatggtgatgacacgaaaggagaggtggaattcaaagacaacccacacccatcttgctgttctgtcagggacaaagttgtgttagccataaagctcaggagtgcgccaaggctttaaaaatgcccagaaaagcctatttcttctgcatccctgaaactgagtgtgttatcctcacaggtgggcatattcaaatactgctgaagatttctcatctattcaaagactagattttaaaagcaaggaactcaagaggcatggtttgggaatgtatggttttctgctaattctgtggtgatcacagagaaaacaacatactcagaggctatttctgtgtactgtaaagcaaagatatatatatatatatatatatataatatatatatatatatatatgagagctgccgaccttcattaaaaggataaagggttgctgattagagtttccttttagattttacagaggctttaaatttaaaagaacacctctgcttgctgacattggggaagttttttgctttatgtcgagtggcttaattgtgcccatgcctatttgttagagttactgtgatatatttagatacaatctatagtccctccttccagaattaaaaaaaaaaaaaaaactacacacacaaaagcaaaagtcagctggcttcagacacacaattcaaggcctatgtgttttattatgcattgcttcagttaattagctttctaattatgatttattctaaattgttactttaaatccttgcccagagactgcattgaggttgacatattactcgagaaataatagggatctggttctctgcctttggctctgagagctacactgtttggagaagcttcgtgtctgggcttcccttccccatctgtgtcaagtcagtcaccaaccttgtacatcaattacatgtgaccttcagtacagtgctcaggaactgcccatctcgccttcatttccaccttgtttaattatgggccgttctcacccagtcttctacccagcacttcctgctgaacttgtaccatttgaacttgtgggcctttcatgtttctgtaccagggcccttgggaccctttagcattcagcactgacttggcctttggactcgtccagatcttggcagaggatgcagactatgctcattcaatttcagcctacgggaggtcaaatttaggattaacccgatggacagctcacctgtctgggtatatttgggtttcaggaatgaggagcagacatatccatcccttctccaatccaagacagtctggttaaatgcaggtttgagttttagcaacttcttttgaggttccttctttatttgtctcccttttctcccttatctacacttagaaattttgctgctaaattttaatctaagcctttcaggacagctctaattgcctcccatcctcacagtgagtctttcttagatggctggtacctcactgtaatgcctcagcttggattcatttaaaggatccggctcgatcatatttctctccctagggtgactaaatgattctaactcggccacatggctgaggtcttctcagtggtcccctttctcccttgctggaacatgtgtgattaaggaggcacaaaaccaaaatgacagcagcgatgcctccagtgttcagcaagtctgaactgcagatcctggagactgctggctggcctctagaacccactttcttgggaacaaagatgtcaagccacagactgcacttctcaacttcccctgcagttataagcaatctgtgaccagttatgcaacaatagaattttagaggctatgagccagtcaaattcacttgtaataaaaggagcattagactttggatattgtctctctgcccaacaaccattgttcagcttttggataggacagtgacctagtctgggtcacccagatgaagaaatcaccccagatgatgtcagaatctaaaaataaataaataataaggaataaaggcccctaaaggattttgtagagcacattaccccccaagctactacaccattactggagagaaaaatacatgtctgtcttattaggtcttttttgttatagcaacttaacatttccatagcttgcacagtgacctgggggaaagctggatttaatagtggaaaagttccagatctcagtcttctccagaggataaactgacgtgtgaatgttgtctcttctacctttaaaactctgattctcaagattttaaggtgttggctcagcagttgagatcactgtctgttctttcagatgacccaagttcagttaccagcacgcacatggtggctcaccactgtctctaactccactaccaggggatctgatgccatcttcaggccagctggcacacaagtggtaatcaggcatacaaactggcaagacacccaagcatataattaaatttaaattttctaaaaagccatcttagggcttttaaatcacaaatcctggcagtttgtctgagtctctgactctggtctagaaaggcctgagaatatttcacaagctccagagatgaggatgccactaacccaggatgggtctttgaagtgtcctgagtatgctggttttctttccacaacacagggaagcaatgtctcttgttttaaaatgtcaccgcaggagacatggctctaggtccttctccacttttccgacactttcagcccaccttgagttttcttgaagctctggtgtgtggctttcacataggccaacagtgaccccacctcttctgagctcctctttctctaccaaatgatttctgcatcacaaaaccttcttgctcagccattctgcttgcagaaatgttggcaacttgtcactcccactcaacaccttttcaagggacgagaaatggccattggtgtataaactcaggtctgctatccttgtgtgggacagtcctaaaggctagctctttgtgattcctcagtgtcctgggaggattgatctgaaactgtccaacaaacttaacactccctttacttctttctcgtccttcattatcctgtttctttgtccccgactcctgattctcaggccctccaaatcgcctccagtaatttcctttgtttacctctttgttttctggagtttcagttacccaagtcaacaagaagagtgagcacaggatagtgagatattctaagggagggagacagacagaatgagaaagaaagagtatatttacatacattgtactacactacattgttagaagtgtttattttattattacttattgtacttaactttgaaattagatatcaccctttaaagaagagtgacaatctctgtattgtcacctactactccaacctcctttcaaaaaggagggaagcagacagaaccacctctctacattgttgcctgggcaacacaacttttgacaaagagtttgaagatggacttggccatcactggagatgagggcatttatgaatgctagcggctgaaaaatggaaagtgataagaaacatcccttaccagcacaagtctggggccatagtgctgactcaaactccaattttgtggatgacagtggaactgctggccaaattgttatgtctttgtatcatcgtttctaaatgaagatattcattcttctcaccacacagtctagggggaaaaccataggaatcacgtagaggagcctacacatccttcaataaatttaagatttttagaaacatatttctgggaagggctccaggttgatcgagggaagagtcttctaaatcctctccatccctgatgtaccttctctccatgttggggacaggatgcgtctctcagccacttgcttgagcagacagctggccaagagctcagtgttctctgattgtttcatgcattcagaaaagtgaactgattctctcttgtccttctgttcacttgttttcacattgactttggtaaattatcagttagcattttcaaagagaaaggatggaggagataaagcaatggtcttaactattccatcattaccaatgaaagattttacaattgtcctgccgtaagtcatccacagcacccatgcaggagaggaaaccatactgttgactttaaaacacacttctaatgcaagcagagcatcctctgtgtaaaaaaaaaaaattggagaagaagagcccaagatcagctgtaacaaacctaccccttcctaggatttgaatgagttagtgtaggtagcttttgctaagtatgtgtgtgaaaggtagatgatgttgatgattgacagatggtagccagatgatagatagatagatagatagatagatagatagatagatgataaaatggttcctttgtacatgttgctttatgacatttttcactgagtgtagtctttttaccatttggcgccttgaaatatgactcagtattttttgtaattttatactcaaaacatgctttattttggaattttaaaagatacattatgttctaacaaacgtttctgagatagaggtaaacacgaattagaaaaaaacaaagactgtgtgggttggagagatggttcagtggttacaagggtgtgagcactgactgggttttccaaaggacccatgtttgattcccagcatcctaatgatggctcacaaccatctgtaactccagttccagaggatccaacccctctcctgatctcactggcaccaggcacatacgtgttgcacagacatacatgctggcaaaacaaccatacacataaaatttttcaaagaatgtggttaaatctctagtgagatattcataccatgcttatagagtgtagttggcagtagcccataggcaattgcaatgtggataattttttagaagaattgaggccatcaaatctttttaatgaggttgtttagtaggaacattcaaatatttgtcttatcatttttcatggcctctattcttccacaggaacaattgctaaagatggataaagacaggctttctatcaaccatgacactgagtagagtatgaactcaattcttagctatgaaataattgtgacctcagtagtgggaaaagggatgaggcacccacagggactgagcctatagtttggctctctagtttaaaggatgtgtgggctaaaggatgtgtgcctttgagaagccagagagaagagtggatacttgtgctgttccttcctctaggcaatgctatagcagacagagggactgccagatactttctgggatggtgggagcatttaggacctttcatctcctgggaagggaagggcctagctgggttcttccttagtatacaatggaaaaacaaaatggtaatacagaccctgctccaaccctgaagcaaaacgcaaaagtggcttctaatacttataattaattcttaagtctagaaaacgttctaagtgtactaacatgttatacacagattttaatggaaagtattagggataaaaataggttaagagattttaagtctatctttgagtagtggctgacactaaactaattcaaaaattctttaactttaatactttgaagagcctggaaggaatgagacctcattcatgttaaatccttttcatatcaatccagttggcaaacaagcaaaaatgcaaaaggagaggtcaaggtgatttggaggagttgagaccccctcccttctgtgcacagctcaagcatctggttgtggcattaaaagggaacatgcagcaaagggatttttggattgtgttgagggaaaatagcacaagatagagtgctctgaggcagagaagttgactttcaggtggcatgctttgggatgccactctttcttcaaaaaattgtgccagtcctagtgttcggaaaatgggaaatcttattttaacataccgtgtgcaggaatggagggagaatgttaattgagagggtgaggggacttacgggggtttgaccattgagtcttttggcagtggagaaaggagagatacctgagctcagtttgaaaaggagattgtcaagagacccaaataggtgatactaacaaaaagggtttatttttcttattcaaaatgttagacagctttgattcatgactggaagaagaatgctcttctcctggaagtgggggtggaggtgagaggagaggaggaaaacaggtaagattatgctcagctgtggctgggtgcctcactgaagtcatcatgatgttacagtttgaacttttcacggaaaataagccaaaatatagtaatttatactggagaaaacagacatgatgaagaagatctctttcattaactttcttcaacacacacacacacacacacacacacacacacacacacacacacacagtggagaactggactgcttagtaatagtaaaggccactgagctttgtaggccaagtgtcagacattgtctctcctgaggactggaagaaccctggtgtgaattgtgtgtgttcacacctctatccaagcagtttcgtgacaaagcttgaacctagattaaacccaaaattcattttagcaaatgcaactatctttacatcttacaagtgtctgaatttctcacttctcaagtcttgcctcaaaaagacaagttggccagccttttcatgtgctaacagctcaaagcaaagtaaaccttaccatggcaaacaaaagctttgcttaggcaaaatagcatgaacagccctgcaaacagagccacaaacagcacctggggtgctaagctgtcatcttccttcctggtacctgactgcacataaacagcaggtaccattttgcccaatcttgcctccaaaccatagacttgcttccttttggtattcatgcttattttcacaggaagtaaaatgctactggttcttgagcaggtgtagttgagtgctatagtaggtctctgtaccttcaggcaaattagatgggaccatgtcatggaccgattaataccttctggcagatttaaaagccagtcatcaatattgacatacagttggccctcttggcaataggaactacaaacaggaagtgagcacagccaccattttaaaaagtattattgtgcccttcttactcataaacagattgaagtgacaaccaaatgatatcactatatttttaccacatggaagaaccacaagaataagtgccaaactacagaaaactgtgtgttatatccagtgtgttaaactttttgaatgcgttacttaaatgggatatataacagtttcattaactgaaaaattcagacaatttgctaaaaattaaaaagagaaatttttcattgaataagattgacagataatttaggtaaattaccccaaacgggtcatactggctaatatgtcacctccagagctcatcattaactcaggggggtccatcctggctccacagttctgctctcactagcagtggagattcatcggtagtgagcagctgagctgggatttgcatgtgagggagcagtgactgagtggttacaggagacaagaccagaacagtaagaataatatatgaggagtgaattcatcaaaaccatgtagcctcttagaactttagtccatttttctctgaaactagaaaagtaatatcaatactgtggaatgttcatgaagagtaaatgaaatgattgaatgcttgtaagttagcaacagtgatatttataacacagcaaatgttccacaactatagctgctattattgctgttgtacatgttatggtcgggtcaggttcatctcccacctagaggagttaattttactctatgcttatgtcaaggttggccaggtcacaatgcttattaatgagcaggagtagggagacgaagtaaagcatagggtggagatggcaagccaatggcgtggacgacccatacgcttcactccacctatgagatacaagtactcaacctctctgctctttagtgagcctgatcacagacactcaaatcgtgcccattgtgctttgcaggcagattccaaccagagcgagtgcataggatgaaacctctttagtgaaatagattcagtttaaatataacagcagttggagaaatggtactcaggggacagtgagctgaacacacacacacacacacacacacacacacacacacacacactcatacacatatacttatacatatatttaaagataaagcacttttggaaaaaatgtgttgattaatgcaatgagcaaagcatattcttagaagagattcaaagattaacaaaatgtccttttctcagaatattgttttatcccagtaaaggaaaacattgaggggagttggggggaaaagacaatttagcaagccatatgctgaacacggtgttttcagtagcagccactgaataatcaggaagacatcatgtcctgccttcaagtccttcaccttgttcccctaaatggaaacacaagtgcctgaggacatttgaagcatgacaaacatcagcacaggctgatgtaaagccctggaaagaatttccatgcctggtcatataacagatggctccctacaagagtcatttgaatattaaacacacaagtcaggcctgggaagaactctgttgtaaatctgtaattggaagtattaaaaaaacaacccttcaaaaaggctgtaaatttttacaaggtacttcttatgcatttcagagctcatgtcaaaagaagattttactttttaaagagaggatttgattaaagagagatctgtgattggagatatacaccatccccaagctactcattctagaaccctggcaaatctgagctttctgatcttccatccccactatctctgcagaaaagagttttgaggagccaagatctgtgagggttttgtggctttctgaggccccgctgctgttactgcttctttttatgtacaacggttggccatgatttggcccagccttatttcatgttgttcgtatttcatttctaccctgctacatctcccatggatgctcagttcaccatgtgtccatcaacatttttcctgaagaaaggggagtgaaaccttgttgacatcccacctctggagagtggtggctattatctaatgtcaggtcacctgctccccacactgctgtgatacttcctatttaagagtcaaagagtgatgttaacctcaaccagagtctaagcttctcttagatgagaagtccagtggtccaggagattttaagagatgtgcttgttagccagggccacagcattttgtaaactcctccattttggctgaacagtgacaactctagttaactccagcaatttgatttctagaagttcattgatttgtttctctaatttcttaactgtcctgccttgtggaccccaagcagtggtcatcaggatagatttttatcaattacctaacattctttaacagagtgtggtcaggcctgacaatggccagcggcaggccaggaagtgaaacctttcaaccactcctgctcctgccccactttctgttccacgcaacccatcttgtaagcagacaatggacattggttctttccgagtagcccctgaaagtccccatccccccaatagaggcctgtagtgtcttaagttcccttatccccttatctgtcttttctgacaactgacgtttcaataatcatcaatggagaggtagatacacagctgcatattcatttaagtacaactttcagagagaaagtataatcttcaaaatcataaaattctatagggtgtgtgtgtgtgtgtgtgtgtgtgtgtgtgtgtgtgtgtgtgtgtgtgttgtgtagaaggctctggaaaggccaaatgagttcatttaaagtttgaagagctgaggcaaaatgaaggaggagacaaattaaggacaccaaatgctgtgatgatcaaggaagcttaatggctccagtaagacaatgcaagggccatcatcaggacagtgtgccaatgaacagcaaacgcaagagtcactctctctcactccctcttcctccttccatcctgaggctggcctcttcattcccatccggaaattgcaggacacagttctgacagctcacaagctgttgggcagtgtgaccccttagcctttcctcaccataatcccatcagagatcttcaggatttgtacatttcttgttctggtcttctctactatacactggtcctttaaccagtcatgacaactaaaagaatttattagctgtactttctgtttcaaatgaaagaacttactaagtatatagcaagcaaaagtaaaagcattgaaagcaagcagcagatatagacaagaaatagacgacagaaacatcactgaatcaggattgagagcaaagatgacatcatctcatcagaggcttttgtcttataaacatgcggcagaactgactagggaagttgagatagccagcggaagttcccaattgaatgttctctcctaggttaagatttccaggcagtgatggtgcacacctttaatctcagcatccagaaggcagaggcaggtggatgtctatgagttccaggacagccagagatacatagagaaaccttgttttgaaaaataaacaaagatttctgtgcctgaatttctggtttcccatcatcactgcagatattcctataccacaggacagacaaacagtcctaacataggttggatataattcactttctagggattctcaggaacacagtattttactcttggtctgttttgccagtttcctcccccccaacccccatcacagggatagtggacaaagggcctttgaggacactttgaaacaaacatgttgggaggagaaaactgatatgatggggtaacactgctccaagggtcattttacagtgagctcaaacagcatatgacaattcaccaatctggcgcattcagggtggtatggccgtagtctacaattcaccaatctgatgtattgcaaaatgttcctcaaaaaaattaaaaatagtggctagaggcaggtcaatggttaagaagaaggtctgttgctcttacttagggccagagttcaattaccaatactcagtttaggagattcacaactgcttgtaactctatgggatctagtgtcctaatccagcctcccgggacatctatgcacatgtgtaaatacacacacagttacacacagatacatgtaaataagaatcaaatcatctaaaaagaaaacctccaaacactaaaaacagaagcatctgacccagctgtaccactctgggatgtacatctacagcatactaagccagcatccacagagatacatgttcatccatggatacttgcctgtcacaatagctagaaaatggaaccagcctagatgtctataaacaaaggagggaatgcagaaaatatagtggatgctcacaatggaattttattcagctataaagaaaactgaactcatgatatttgcatggaaaatggatgcaactagaaattatattaagggatgtagtgtagactcagaaagataaataccaatgttttctcttatatgcatgcctatattttaataaatagtatatatatatgcatgtacatatatatgtatgctatgtatgtatgtatatatgtatgtatgatgtgtaggtataggtcatggaactggaaaaggaattgactatgagggggaagacaggggtcttaataaagagagacgggtaattaaatatacaatatgaaagcagaaggggactattcaggggaagaaggggcccttcaggagtgtatgcaaaggaatgaggaagatggaggaggcatgctaattaaataaaaactaagtgtataacaaagggggagaggggctgacagaaatattctatagtgagatcccaaaatttaacatcactacccagaacacgagttctttgactctacagtgacctacactctccgaaagttcactgtatatgatatgccagccagataggaggaatataaactgtataatctggcctctattaaatatagctctataatataaatactctgttgaagtaaagtttagtgtatggttgcaatgtttctggcctcagaggctacgcttttccttgctcttcggtttcagatggtaccttcgtgtttaggagcaggaaaaccatctttgtggaaggtgatgttgggtaaaggagaggcactcttagaggtgcctagccaaactcaggactctggcaagtggttctaggcctgttcctacaatattttctccactgccttctgtggggttccgtttagattcattcttgaactccactattgttcctgtgctcctcatgtcttgccatcccagctcctgagctctcatgtcccactcagtctctagctgtcactttcctattctttgcctcagcagttcagtctaccagactgacccatggaatacctatatgctgtcactcagcatctgcctgtgtagtgaaagagtcaagaacaacccgcggtgctaagctgtaagcctgtaacttttgccccccccccataacactacatcattaattgtaaagcatgattcctgggtgcttcccaactacttcaagccgcagacttcctgcacgcatcctgtgtccttcatgtacatccgtctacttcctgcatacttcctatgtgcttcctgcttcttagactaatcccaaagagggcaaagacagaaaactcctgtctcagtgtaaactcttgtctccttcccttccctctctttttcatattttcaggggcaagatgggtgggttttctatgaattctctagcatatttttgtgttttctaacttcagatcagtcttacagtcaagcatggccttggtgtgctaaatgagtatgcaggcttttggaaaaatcccatctcatgaaaaaataacctgaccgggcaacacattgtcttgtacaactagattccaaatgtcaagagctgaaggttacctctgctttaacttctaatcccctctcccagatggattcacaggacagattatggtaaatgttgtatactccagaaagcaaaagagaaaactattttagtgtttaaaattaattcttatgtaaacacggtaatactcatgacttactttattttcctttggttacttttaagacagtctcgctgtgtagttcaggctagccttgagctaaaggcagtcctcttgccttgtcctccgttgtgctggcctttcaggtgtgccaccatgccgagttacatctccctcttctttaagagttcagtggtctctaagtatccataataattattccaggaactccacacatgacgaaatctatgatgcttcaggcccttatgaagccatggcatgtccctatataagttttaaaactatcactatcttattcataataactaatacaatataagcattcaaaaattatcttatactgcattgtttagaaaaaaataccagagaagtctacacacattcaaagcagacacaagtttttaaaagtgtattttcaatctaattgaatccacaaagtgggtcccaagaatccagagagcctactgcacactagagctatggtatgttataatgcagggtgggtttgttccacatccttcaagttggttgaacttactgcctttgtatatacaactaacagaatttggctgtaacacagtctgtgtgtcactgactttatacagcacaaattagaaaatttagtgcccatttgtcccttagaaattggacttgattataaaagaaatctaaaaataatgaccttacacaaattaaatgtttgtttttcctacatagtgaaggtagggtcctagtccacccttcgattaacatagctatttggataatttgagctaatgggctgtgagggaatgaagtacctcccttcaggtctgaagtataaaagaaagaacaaccttgacaacaagtgaacgcttgcattccagacattacagctgaaggatgcacttgtcacactgtgtccctcagtgacacatggatcagagcaacccatacaacctgccatgcacacaaagtgaggagtacccttctgtttagacttgagatgctgggattaaattgtccctgcagcctactatggtctaaactgacaggtacaaatggatgggtaaattacagaaggcacacatctgtttcctcctacccacttttaggaagattttatggaagtcccacttaatgttattaatttgtcttactcaacacttttttataggctacccatatatagacagaagatgaagaaatatcatttattagtttggcgtttcatgcacctagtaaaactggattttgttagtaacatgaaacggaagcaatttctattaggcagaaaagcattgtgtgctataatgtattccttcgttaccttcactcatatatacccttatttacagtggtacagaaaggggatttatcatcactcataaaagcctaaagtttacatttcaaggatattgcacatttggtggtttgaatgatacaattaagagttaaaattcacaaacatacagttaataaatcataagaaaagcatagtgtatatttaaaaatttacctcttcctaattactaatttccactcatatgagcccgagctttgaatgtgtcatctcttcctatgggagaggtgtggcactttgtgcctccagttctgtcctcagcaacaacatgtggttatcttaaatcactcacagagttgggagttaccactacaagaatcagctaatacactgaaccagagcttgatgcattgtcttgttgattgtccacacttaggatggtgatgaaattgtttctaacacaaattagacttgaaagtgtggtgtgctatgactgcaggccctgccttgtaaagcacaccacaggaaggaaacatccccccgccaccccgtgtataacgagagcctgtaggtttaagatatctttattcagataaacaccagccaaatgcaaaccagagtgtgccaggggtagcaaggtagccaggccagagagaaaggctcccatgtgcctgctttaagaacctaatcagcatcatcctgacctcaccttgaccacgccgtgacaggagtggtcgggcacacctgtaaccagcctttaggttacggtgtctccctacacctgtgtttaaaaatgatgatctgaaaatgtcgctcatcttgctgacgagcaagtgaaatggtgacatgtagctttgttgtgtcacttttgtctttctcatgaatatgagaacatatcaagcagctttcatatgggaggagactcatttgtcacttgtcttgtttgaaaacagaatcctgtgaggaccacctgtttataaggaatttacagtaaagtccagcacatattaattactattataattgtcatatgtcattatttataaattatgtgctgtttgcctttaactagtaaaacttacaataaatgaaaacatacacaaacggattccaaccattgttaaggttttgtcagtaatccattttcttttcagactcagatcatcccaaatgagataacctctaagcctgtctcgtttcttgcatttaccctgaagtgcaggcttttggcaccatatacagcattttatttttgtgtttttaaaattttagtttttgaattagcacataaagtatcaaatttctttatggccttttatacataaatacttagttttgtttgactctccccttgcctcctctcctctctcctgctcctcgctttgcttaaacctttctatccatggtcttctccctttccatttcatgagcatccactctactggcatacagtctttaatcagatacaaatgggaagcgggtctgtttggtttgttatgggtcagctgccctatgaaccaaagggcaagccatcttctcttactgaaaatggagttctaatgggtctaaataataaaagcccagagtcagatacagaggaaaatgctgagagatcagagagaaggaggagcaagccaaagccacttttacctcattagcttcccagcagaaaagagagcaaaatcctgtttcttcctgcttatatcctctctctgcccagccatctcacttcatgtctctgcccagtcatctcacttcctgtctctgcccagctatatcacttcctgtctctacccagccatctcacttcctgtctatccagacctacagatctctatggttatctaggggcaagctccatcctctgatcttcagacaagctttatttatacaagcaaaatatcaccacaccttggtgtgacagaaagtacaagctattgtatcatcctcccattggaaaggaaggggagcagtagctcttctgcggtgatggaattgaagcaatttcatgtggtagaaggaccaactctcttgctgtggaattggtcccttgcttgtctagctggactggacttggtcattctcccttctatgaggctccttgtgcctcatcctcattctctgtctctcttaaaatgcctttccagagctacacagctctcccaggcaacttggcgcatggttttctaggaaccaggaactatttgggggttcctagctgccttagtttctttgcctgtttctgtgacaactactatgacaaaagtaacttaggagagatagggcatagtttagcttatagccccagattacaggatgccatttggggaactcccagaagcaggacctggacacctggttatattctgtctgtgatcagaacaagaaagtcaggaaagcttacacactagttctcagtgtgccttctctggttctacagcctagaccctgcccacaattaagatgggccttcctatttcaatgaatgtaatcaagacaattccccacatgcatgcccagaggtcccctcccaggtgattgtacattttgtcaagctgactattaacactgacatcaaattagccatagacgtttccaggcctgtttggaagggagggacatatactgcaaaactagttccctttattcttattttagtttttctctgtttgattctgatgaattgcaagcctgagggaaggacagctcagcactttgtctacttgtggagaggaagcctcaggaacctcctttcttaggtccaggtccctgcactctgcccttttccctgtgaggggcacaatgattctgctttgagtcagttagtcacagtcatctccagggaaccagcacactggacttcccaccattcgccaggaccactgcaccacagcggccaccaccacctctagcagcaggaggaggaggaggaggtttggggtctctttcccatggaacactactactgtgcatcagtcactattctatgattgtcacggtggctacattcagagcatcttcaccatgatgtcagagacaaaggcagtatctttcctggctggcagccccagtggtgagtctgtcattgcctctccagcaaggaattgctgaaagtggtggaaccagcacaagctggtacatgaaggctttgcttcagttcctcctaatcaaggggccccagcttttctgaaaagcaggcagaaattccatcaaatacacagtagtgatcccagctttcctacttggagtcctgcaagtcctcctttctctcataaagtcacatccacacaattctacacaaagcactcctcttctgtatcctgaattctgctcaggctgatgttatagttagctctgaatcagaaaggatggagaaccagtagcctaaacatatcaacaattttatttgggaagcatagatgtggctaatatagggcctatccaggtaggtactctccaccttcagtattgtgtccaccattgtaggacaaaggggaatagaaagagaatgtgagggattgatctagcccctagttaaggatctttacttcaagtcccttgtccaaaataatagtaatgacaataataatgaataataatagtaatttctagtagaatagatcaagagagcagcatgaaaggaaatataataaaatcacactcagacatattaagttttttttttttacaattgtaattatcttttactataactagagtatttcccagagaagctgtctagatgaagttgtcaagggcaacactaatgtcaaattttggactttggtaaccacagtggaacttttgtaaggaggactataataaccaaaattgtctattgatgattggataagagaccttcctcaactttagagtccttatagcaatctctgcatttcataaattcaaaagaacttcccagctgggatgcagtaatttcatttactctaaaatatcagtgtaatcacataaaagggaaaatggccccaggagatgttcttttgctattagcagtaacatatataaaactgttcccagaaaggggtggttaatcatgtcattggaaagggccctaagaagtcatttgtgccatgttggacagataaatgagtgtcttaaccttaaaaaatatatccacggaagaagattcaacttcttcatttgtgggcttaattattgcaggtactccctagggcaatgttagaaatcaccaatggtctcgggcctttcaacaactatttaccaagcatctactctgctaataacatgatcagagaaacaatgaaatatgcgacatagtcattgtcagtaaagaggtcatgcatgaaaaggtaaaacaaacaatggagaagggaagttctgccctgtgtgaaatggcctgtaaaggattcctggaagaatgggtcactctcggaagaagggggcactcttgggaaccacatgagtgtagagtgagttcgtgctagagaacattccagtacaaatggtttgctttccgcattcctgaccgtggatactgctctcactgactcctatcatcccctttgctgctttggttgagacagctctcagtttccacgccagctaggatggtagacattgaatttgcctccatttttttcagatatgtcattttctagggttagaagaaggagaagtgtgcaaaggagtcaccttcaatgtaaaatgtaaggaactgttggaaaatgtgagcatcaaaataactaacagctaaataaaattttaccaaaaaaataaaaacaaatgaacaaaatgtgtgaggaacaaaatgtaattgaaaatagaaataagatctgagagagctctgctaattcctattagagcctgagataagcaaggagttgtgtccttagatatcagatgaccctggactcctgaacaccgaagatccccctgcctggaaaccacaggtgcacatcacaatgcccagctaaaagaacatgcttctaaaaacaactatctcctagaataagttagttggaaactactaaaagtaagcatattaaaaatgcatatcacaagtttaaattatgttattatgatttacgatcttaaatttaacaactatgaattcactgattcaataacattttcaaaagctatttcttgcctgacacttttactcacattcctaccggaagtaagctttccctgtgtcacctcccccttccctgtggttcccaagagtgcccccttcttccgagagtgacccattcttccagagaggcctaatgaccactctgccttcaaactctttgctgtcatccatactcagcttttctaagaaaccagtggtgttcccagcttaaaaggcctgtcctgtcatttgccttcaccggggcaaggatgccttaaggaagagttattcttatttattgttgagtcctcaatgattctaagtctaaaaccctgaaggtacttaatgtatttgttgaatgactaaattaaaggaccaacaagggtagggaagtattcacatagtccaggaagaggaagaagagtggtttggttggaaaatgaggagacagtgtatttatatgcaaacagaaaaaatgcatagtaaattattataaaagaattgtaatgttgtttaattattccattgtctataattccattcaattgtctataatgtttgattgactatctttttagcaagtctggtaacctattcctctagtgaaggcaagaccatcagacagtagggcaaaataaaaatcaattgtaaaatttgtatgtaacatggataggcatttgtgaaaacatgattgaagaagaaaaactcagattgtggatgaagtttcatttttaaaaatgaatatggaatagagaggtggctccatgcttaaaagcacttgctgctcttgcagaggatctggcttcagttctcagctcccacatgggggctgacaaccatctgtaactctaatcctggggaatctgccacactctggtctctgagggcaccaggcatgtatatggtgtacatattacgaatgcaggcaaacacccctatgcacaaaaatgaaagtaagtcaatctctataaaaaaatgttacactgaacctgacaactcaaagtttggatgtcaggaagaaacatttatattctgctgctagttctctgaagttttataaagctggggcttcacacatctttcaagccaaaggtccttgcctaaatccagactctttttcaagagcctataaaagaaaagagaaaaatgagaaaattcagagactccaaaactagaaaaggacatagcaaacttaaaacccataagtgtttaatttagcctctaataaactgtttaaaacaaataaatatattattaactcaatagtatacatgaagataacattgctgaaactaacaagctgatgtgacataaggtcaacaaatcaagggtaattcaacttaattattctttgtatgttacatttaattagcaatgtaagtacattttaatgcatggaacaaatggtaaagaggcctccaaaaatgagaggtcacagatcctacgaacaatcaaaaacagttagttgcataatccataaggctgacttttatctctccatctaacatggaaaatttgaatggtaggagatgtaggaagtatctccagttgcttcaggctttaagcatctaaaaagaaatcctaattgacaacggaacgtggaaccctgtgtccttcaaggactgtattatttccaagtttatgttgtgttgacagaggaaaatttaataaacatgtttcaatttaaaaaccaatgatattaatgagaaattgtcacatggcagacatttctctggctttatcagtacaagatgcactggtttttatctacacatgtttttgtttttgccccactgacaaggagcaagtgtggatgcaatgggtatcacataccaagggtgaacctagtcactatcagcaaaatccagatggtctgtcattaagaatagtagccagttcttcaatcttgcaatattgcacccggtatttctatgctttttttaactggaagatgccactgagaaccacactgtgactctgctgtgctgagccaatgtctgcaatagccaaaggctcatctggagatggctgctcaggtaccacctgctggatgaatagattctctttaggcaactttacctggctgactggggaaatgaaagtctagctcagaaaagtaggagcaaatagactttgttgttatccctgccttggggcagattcaagaggttcagctctgaaaagaatgctatttggaatctaaggtgttgaattctgattttcttcaccaagtcaaaagaactaccttaaccctagatattaaatcactgcaaatactcattcacttgctctattttcttctgcccctacatgaagcttacctatccctagaattcctacggtgggggggcattctgtgtgtgtgtgtgtgtgtgtgtgtgtgtgagagagagagagagagagagagagaggagagagagagagagagagagagagagagagagagagagactccacgtatccgcacagtgtttgtttctctggacataaattttcttttccacacaaagcagcaaaggcccccaaagctccccagggacacagaatttttgagctcgatagcttccactagcaattacattctgtggctccaatcaaagcctttttttcacctggatctccatgtggcctgggctctttcctttatttcttaattctaattctgaaaagacagctacggctgtgggtgtccacattcaaccaaagcctctgtggtaggcattgctgaccagcataacattcatcgtctctgcccgatctaaattggacctgggagaatttctccatttgctgctaaagcataaaaggctccacattgggacgtttccctgagagaagccatagctcacacatatcttcttaatgcctgtaaaggaaattgcccccaagtggtgatctgtgactcctcatgggaaggtttccaagggaagtagatacttgttttggctaagaagcaacttcattttctccctgccaaatgtggcaactgtgcccacccgtgtccacacaccctgcctccccttgctggaagcactccagtgatcacagaatcccactcacaaaaccttctttctgcagctctgctcttctcttctgctgtccagagactccccactccttgatcttttaccctagcacacaatgatgcttaaaatctctattttaaaacaatctttccgatgcttttgtgtcgtctctagctatgtcctgtttttttccccctcctttctttactgtgaaatttcttttaaagaaatgtttcctattttcttcaccttttattctaccctcagcccacacaaatcagattgccatcactccacctccaatgaaaccagtatcatcaaggtcaacaatggtgggggtgaccatatgttcttgtttgccatgagactcccagtttgcacactgtcttggcaaattattaataacttccctctcactctcaaaaaacttgtgcattgaactacaaattacatgggcaataaatcatccaaccaatgacctccatgccccaaacttcactggctacttctctgttctttctcaacctgcttaaagtgtttcttaatgacctctaatgttggcacgtggccagatttcaattcacttcctccactgtgctctgtttccttcttctgcccactcccattccttcttcctgaatgaagtccttctgctctggtatctccaagggaacacaacaccccatctctccccatccacttactcagctctctccatcgtctctccatcctctagcatgcttcccttaaaactgtacccttttgtgcatgttgaggttttgttgttgttgttttgcttgtttttttttcgagacagggtttctctgtgtagacctggctgtcctggaactcactctgtagaccagactgcccttgaactcacagggatccacctgcctctgccccaagtgttggggttagagttgtgtgccaccaccgcctggcacatttggttttctattcggtctatcatgctgtgaattcagaaatagaacaaggatctttctggacgatcatacttatatccacactgtctacttgagtatcatggtatatcaggtttttgataaatatctgctgaagtaatggatgaggtatcacttagttgagttcggaatcttgaacattcttcatcctatcgtgtagtcgcttcctctgcatttgtgtaatattcattctgttatctgtgtgctttagaccatctccttgactgattcttctataacctataaactcccaagaaacaatgatagaaggagaaaatatgtctaattttgtttccaaagagctcacctctgggtgctaaactttctcatggccttgtagatgggcagagacattcaggtaaactacaaagattgtagggagtgttctggatctgtgtcactttggaccctttctgtcccttgctggtttcttaatctctacataaatctgaatttggattcacacttgcctctacatctgcattttagtgaggactggagtaggagatggatacgtatacccctcaattcccaagagaaatgaaaacatcaaaggcaccaggaaaacaatagaacacattaaatcagatgtatgtgttgaatgtggaaaaatagaaataaccatcagttcaacagagtgagctgtcataatgacaatcaatacctctttgtcatcttcaatttttaacatgtgaagctgtcattctcaattctcaagatgctccgttctctctgaggaacatttagttctctagttcccttgatctgggctaactctcttcctgctccccaggaacatgttctcattctgaaagctccagctcagtagtggcccttcagctgggaaaaagttggcgctctttgttgattgtatggtgtcatctgggcacatgcagagttttgaagtgcttcataagatggcaaatgttgcaagccaagagcagtctggattgcaatataaataaggacagttccgaaaaatgattttattgtaaagacatcaattgaactgaaaagtcctaactatcaggcctcactgtggctgagaggaaatattcaagacccatcatctctcaccctgatactgcaaccctaaaggaatattttgagtattcatttggctttcaacaaatcctgttcctacaaactattccccaaaggaagcctatagttgttcatatgaactttttaaaaatcacatcttgacctatgaactaagatcaagaggtctttgctttctaaagactgattcctttattttagtatttttttttcctttggaagtgactagtaatacaagacaatgaaaattttatatagcaatgtttatgacaagatcattttgtgtggaagctgagctggagtctggtgccttgaaccactcagccatcttgacacattcatcatttgtaaccaataaaatttcagtgtaacacgtattatatgtataaaaatgccctaataaaatacttgagaaatccttatatatattgccattaaaaatcatttgctatgaagctggagagatggctcagtggctaagagtcctgtgtgtactagaagaggattggagtctggtactaatcacagttgctcaggggcacccgcactcgtgagtacatgcccccccacgcccccccacagtgcatatacattgcaacacatatagtaaaaagtaaaaattttaggaatcatttaacatgagaaagctcacaatgttaaatgaaaaaggtataaatctttagtttctaagatccagaatttccaaatatgatgagtatgtgttagaaaatattataaagacactagaatattgacaatggccttatcaaatgataaaagattttttccctgttttatgtttgtatcctattttataaattttgtgatctctaaattttgcataagtgtttgatccttttaaagccaaattcgctgcataaatttacatttctttatgtagtatttagtcaaacataacttttttcctgagatgtactcctcttaaacatttctccacatctgaagagtgagtgagctgtgaagagttcactcagctccaaatttgtgatataaatcaggaatcacaggatccccaagatgcgtgccttagaggtatgatttcaatctaagtaaaaatgccacgatgcagggagttgtaaacatggtcatctttaagtatgaccaccgtagtaaaatgccactgcagatgcccaggtatctaggtatcatgctgggcctaaggagttaatttccaggaaaaaaaaaaaagagtaagtaacacaaatcatgacatatctattctcctgcccctcccccacctctgaaaatatccagaatttgctttaaaagctatgcaaaaatggcaacaccccatacagacagaagatcaagggagggaatgaaagatgaagcagcagatgagataatagacaagataattacagtactttaaaagcctggggtttatttttaagatgtaagagctctatttagagaagcccatagctaactttatgtgaatcttgaatgaattgttctgaaacatgtgaagagtaatgaaatgaaggagagaagagggcttgcttgcctttctctttaacatctgttctggttagtccatggttgaggtagccgggtgatgcgatggccttgacatgcagagctgatgccactgaccaacatgggtagcgcgactcttggagttttatgacaagctctttccctttcttagagtctttggcacaacccacacagtcagactactgtcatttcagaagcattcaaatgtctctttctctttctctctcagtgtgccccaagatgggaagaacatctcatctcagttgagaggtggacaccacactggtcctttcctgggaactgagcttttgagctgtcctagtttcagacatgttcttccatctgtaatctgctccctgccgtagtttctccattgccatcctggggttcacagccacggccccacagttctatctgtgctggaggcaaggactatgaacagttgaaaggcagacgttttggtctctgttgagtcccattttctgtgttttcattggtcccatatttggatagagtatgggtagcctcttgttgacatcagagaatcccccaaagcctggcttactggagaagtcttcagttcacactgacctgtccatgcatgctgtttcagctagaattctcgtgtagcaacagtacgacatacttccgtacctctatcaagtagaagatgggggttgaggcttaggccacagaacatatttaatcaaaacacagtctagttcactgaatttacaggtaagatctacttgaaagtggggtcccagagagcaaaatccagcattgttagaacagatcaccaacatctttgggattaaatggaacgttctggcttcttggacaagacaacgaattcgatttttattttgaaagtcatttgcaaaggtcttggatctgaaccaaagaggggcaacatgatgttgaaactgacacactctttcccagcaggggagcaatttcgagtcggtcttccactgtatgaaggttttctctcagtgcagcaacatgacttgactctcctttaccagagtgtgatgttagttctggattccaaggtgggagtcagtagacaaaactaaacaagcaagggcgattaggatattgccttttatgagtgaaaatggagagggagctggaaaaagatgagcgtgggtatctatctgtcagatggagaggaaaggagaaaaaggtaaagactagaaagaaatggcctgcggctgggaaaaggttcagtagctaacagcacttgttgtgtaagcatgatgacctgagttcaaatccccagaacctacagaaaaggctgagtgtgggtggcaggcagtggagacagagagcatctcataatattcttccattaaggagtcaacagagcactaggtaccattactagatatatatctgaatccttaagatggaatgtgtgtgtgtgtgtgtgtgtgtggtgtgtttgtatgtggtatgtgtgtgtgtgtggtgtgtgtatgtatgtgtggtgtgtttgcactaggtaccattactagatatatatctgaatccttgagatggagtgtggtgtatgtgatatggtgtgtgtgtgtgtgtgtgtgtgtgtgtgtgtgtgtgtgtgtgtgttgtggtgtatttgtatgtgtggtatgtgtgtatgtggtgtgtgtgtgtggtgtgtttgtatgtggtgtatgtgtgtgtgtggtgtgtttgtatgtggtgtatgtgtgtgtgtggtgggtttgtatgcggtgtgtgtgtgtgtgtgtgtgtgtgtgtgtatgtgtatggtgtgtgtgtatgcatgtggtgtgtgtggtatgtgtgtgtgagtatgtgtgtgcatatgagtgtgtgtgtgtgtgtagtgtgtatggtgtgtgtttggtatgtgtgtgcatatgcgtgtgtgtgtgtgtgtgtgtgtgtgtgagagagagagagagagagagagagagagggagagagagaagagagagagagagagagagagagagagagagtttatgttggggaattgagaagtaaagcagagaagagagagatatttgagatccctagtgcttgaacacatgtcagtgttcagtcaatagctagctggcacatgtggagctaaatttaaacatatgtttttggtttcaaaaaccttgttctagctgccaaaggaagagaggttcttaaatttttcttttaaccatcctgaatttataatagggtggtcttatgaagcaaaacataataaaatgcatttatcggaaacacatttatgtttgcaccagaagaacagggtcatagaatttatctagaagtttcatggtggatttttctatgcatttatctcccaaagcctttgcatatttcacataagcctttgtaatgtaatttttacaatgtgtttcttgaataaatcatgtttactatccccaagatctttttatctaggtatggaggagatgaggtgatgtttctttgttgtaaactgagaatctgaaatagcttatagatgcagcctcattaaacatcttgattttattgcataaggaagggcacatgggattcagatgtcctctgaattagaaaggctagttttgggtccagtgtagagtaatttctctggcaacaagaccattcatgtgcagaatctttggccctcggggctcttgaccatcctgtaatgacatttgctgtgcttcattctgacattatcttttgatgtccactgatggaagtatttaacatgtaactgtgtgaaacttgctgttttatattcataggaatgttgttgagatcattggagattaaaatatcctttaattaaaaattaaatgggaatgagagaagtggccttcccaaggaagagcataccaattggttgtctagtgccagggaagtcctgaaaacatatatacaagtaacataatatgggctcaacagcctatatttgggaatatatatatatatatatatatatatatatatatatatatatatatcatgcaataacaattagtgagaaaaaaatgccatgagttggaagaagagtagggaggggtaggtatctgggagggtttaggaaagggaaggtaaaatgttgtaattgagttataatctcaaaaataaaataaatatatcttttacataaggaaatttcttacctactccatttcttggaagtactttatgccttcataggcaaatgtcaacctcagttgtaagcatttttcctcttgctttggtcagtaggaagctcaaaggaaaaccccggtgagtggtctttaatctttgcatagcactcatcctgcatgtttacaacttgaatttacttgcaggagaggtcttcaatgttgttttgttttgttttttctttctgctgtttttgttgagccatgacttcgcattgcccaggtaccttgaactctctggtaaccgagggtgactttgctctcttgatcttccaacttcctcctcccaagatctgaggctacaggaatgtgccaccacacttggccttgatatgactatctttcaaaatttgtaactattacctttgggaaaatatgtggtctatgttaaaaatgtaaatgttccaaaggtatacaaaaacctaaaacgcaaccaattcattccagagcccaacacacattcctttccttttcgtatctctatgactacagatgtttgggccagtctcttgtgcagaaggcagctgaccaaagacatagctgagtagtaattttgtcaaagtccacacttctggcttcatgaaataagactgttagctggttcttacagacaggctgatgcattctataagcccatgctcatttgtatgtgttcgtgtgtgtgtgtgtgtgtgtgtgtgtgtgtgtgtgtgtgagagagagagagagagagagagagagagagagagagagagagagagagagagagaagtttttgatctaccaggaaataaaaaacaaaacaaaagagtggcatctacctagtttccctcttcagcctctctccatcttttactggtcttctaggccccagttacattgacaagttcagttctttctaaaagcacatcccttgccatacaaggctgatgactcaggtacctgaactctctcttttgtgtgacacacacttttacttttgatctctagccctttcctcattgtcttccctggcttggcttttcttcttctttggtttccttctgttcctcatagcctttgacaccaagcaaggtagcatcgatgttcttgttgctcgcttgtatttatcttttgagaggccattacaaacttacaaagataaaaataacaatatgaaggatgtattgtgcaactcttttttaaagtctgcaaaaacagcagaaaaaaatcaattagaatcaccatggtaactaccaacaattttgtatacaagaaggaaataaaataagaaaagagacaaaactaaaaaaataaaataaagtgactcaaatacctaggaagcattctcacagtaaatactacagaacagggtccaagaaaacaggtcttactaccacaaagttgaggcacgtgctaagtcctcagtatatagtgtaggtattgtgacataaatggctattcatgaacttgaatgatgtgatttttcttcaatctagtaaaacaaacttagatagattgagagaatgagttaggtacataaagggcaatttagaatattttcacaggaaaatattttgtatttccctatacgaaatttgatagcatgagataaggaagtgggaaggaacatttttataaaagttactggtggggattagaaattagaaatgtaaattctcagatgtgtgtggtctaggtttctgtcctcatgctctagagctaagaaacaaacttacaccctgcaatagtgcgtcatttgtggttcccattcccggtggcatgtaaaattctcctgggtcttgcagacgggtttcctaacatcaccttgtctggagcccatccaggactgactgttaagctataatatgtgagggtgtcacctgggcatgactatttgctaaggcctttcctatagagtggtacagcagttggctttgagaaccaaccctcaatctatcctttgcttgtgtgtgctgtttacctacctacctcatcaccgggaacttcaggacttaacctgctaggtcctctgcatggcatgctaaatgatgctctctctaggtatccctggaattagtgagcatactagcttacatgtcaaaggagagtaaggttacaaataatgctactgtttctaaccggctaacctaaaagtagaaggtgactgagatgtgcccaatgcagtccacaggggtccttctgagtggacaagagaggcaggagaaagggaggcagaaatacggcagtgtgagaagattcggcctgcagttgctgtaggaagcaggtcactagccaagactaggacagcctcaggctgctgaacaagacaaagaaatggaatcttctggagagtttcctgagggaatagtgcttccttacaacacctggactttatccccatgggaactattttgtgcttcagacctacataactgtaagataatccatttgtatttcttaagcaactacagcgacacagatttttgtggtgactggggacagcagtgagaagaaattaacacatcttgtttccataaattatcaaaaaaaaatgtcctgggccttatgtaagttaaaattgccagttcaacttaaacatcaacgaggctgctccctccccatcctgctgctagtgtgagctggcacttacaagccagggaggatgctgagtgctctgcagtgctgcctacagagcccagcttctgtggtcttcttagaaacaccatcagctcctgccactgtggcctctgccaaaaggtccctatgggttttcagtccttgttcctcattcatactcagctttttaccatgaagggttttttttgttattgctgctgttgttttgtttgtctttatctattggcaaaccacattctggtttacataatcctcccttttctaacttgagtaattagactgccatgataattctatagggggcaaaagccaacctgttccaagacatgtttatgcctcatctgtcccctgtatggctgcatgctgtagcctcatctgaccattttcccagagcctttaacactgcactcctaaagaagacccaacttccatgatgctccattcacctctctccgctcttcctgaacctgggctccaaagctgattctttggcacattgttccccagaggagtaaaaagcacacaagaatccatctccagcacaccagattgctatcaatcttcattgtcacccaagaatggcagagtcttccaatctgcttgaagtagccaaggtttatttttactctttatatgaccttttgaatattaaaacaatcaaaaccttttgaaaattaaaacctgtttgcctggtatcctagatgagctggagaattaatatgaggaatgtcttaccatcattgaagacattgtttggaaaaatgactctggtgttcctactttgacatcatcgctggctggtgggactctcactggactggggcattgacagatgctttacatcagtaaggagaacacttgatgttaatagtgttaccgaatgaaactccaagatccttgtctgagccactttactttctctagagagaaggtgtcagacatcctttccatgatgctgctcccgtggctcctgcctagaaaccaaacataccactggaagcttgggtgtgaaaacacccagatctgcatgtcaatatccacttcctgaggatctttggggagagccatgctcagggagaggacaaatttataaaggacattagctgtgtgcaaatagtggaggcatgaatgaagatgcagttagcactttcaaagtttccaagctgggaattttgttgtagatggaaacagtgctaggttataacagagtgcgtaagctttacctcaataaaaaggataattaaaaccaaaacaacactgggtacttgctttggctttcgaattagtgtctccagtagcttgttgggtgttctggaatttctgtccagtttcatcagcttattggacctagaggagtggataccattgcacattgctcctagaattttaattaaatccactgtcttctaaagcatgcaaaactgatttaataccatgaaaagtgttttccatgtactttcaaaaaaagtgctttcaaagtacttacaaggcaaggtggctcagccagtaaaaaatgctagctatgaaatcctattgatctgactttagttcctgggacacatgtaatgatggaaagagtgacaggactccacaaagttgtcctctgacttccttccacacatatgttgtggcatgtgtgcctgtcactaccaccaccaccaccaccaccaccaccatagcaataacaagcaacaacaacaacaagttaaattcactaatgatttctgcttagaactaaagtttatgagagcatttgttcttttctctttggttattaaggaagttaataaaagcaagtgttacgttaaacaggtaaaacagagaagttacaatcctgagtttctttggtgatatacagaaaacaaggaatccttgggaaaaatcacctaagttggttacaaactctagagtgctgtaatgagtacatggtgtgctgggaaagatgcacacacaagtacgtgttgtaaagttcaacatatgttccacacactgatcggtaaatataagagcctaacagcaaaaaacaattcaaagagaagtatacaaacaagcttggctggagttaacagattaaaaacatatcatctactttttttttcttttcatggttataacatattttgatatcaaggagatacatcctttcaatgattctaatgctcgcctgcgctggacttgcagctcagttctcccacacactagcttcggggcctttctccggtcaatgtttggggtcttcctcaatttgcttttccccttatttttgaaacagtgtgacattcaagaagatatacggatccttccatcatggtccctccccctccagctctggaattctgtacacacgtctccacacccagctttcatgtaggtgttatagatgcaaactcaggtcttcatgactgcacggaaggtactttatggaccaagtcatctctacagccaggggcctagtcaatgagaggaaacagtgtgtgcaaagtgacttgtacataattggtgatcattgtatctaagttacccccttctctaaaagaagtctattgtgcctaatacccgaaaagccaggcattgtgggaaatatgaaaagagaataaaagaagttgaatgggtaagagaacatgaaaggtgatcatttgtttctctagtgcattactttgtgtgtcaggtcaggtaaattaaccacgctagttgtaagtgagttattttcaatgttcttccatttacctgttcccctcatcatatttacatttgtagacatagaccccaaaagagagaacagaacagaaatccaattgaggagacttgtcactcagaaaaaacaagacgagtagtgttcctgggagtatggaatacactgtctcaaaagggacttggaaaacttagattagaactggacatatagtaaagataagctttatcacttgaaatctttagttctggtgtgcaaacacacaatacatcacgtcaagccacaatgtaaaataaattgctatggtagaatgtttaaatgtttaaatcccactgctcaaaaagcaaggaagtatccatgctccttttcaataaatacgattctctcttggttttgttcaaagtcttcacttctagaggctagagacttccatctcaaggtccccatctgtgaatcagttccaagctgcagaaattttattttagatcacaatgcacctgtagcaatccatccatccattccatcaggacggaagttaacaaacattgtcaaattaagaaagaaaaaaaaaacccacatgtgaaagtaaataattgttttcaatttttctccaactgcttggtagcctatgaaaggcagtctcccaaagtatcaggagaaattgaaagtaaactcactctggatttttctaaagaatatgttcccaagtcattcagtagttgcagatgaatgaaagtattataatgctgacataggctgtgacaaaagagtagactcagaatggtcttaggaaaacaaagcaaagactgtaacatagacaccagacaaaacaaaacagtgctgactcaattgtttagtccttagacaaaagcaggtgttagattttacagctgggaaaaggagggctgtgattggctaagtcacttgcttagtccatctataattccaacctattctgccttcctgtctcctagcctgggctacatctacccgctcttgggatttatgtcctctgctcctgacttggtgatcttggttcttgggaaagccattcctctactcctgtggatgtttgtgctttgctaccactggaatccatgtctatcgggttatttatgtaaaatgaatagcaacaattttttttgtcttgtctttacatttacaagctaaagaaactccaccaaggtaggattttaacatcatgggaaaggtcggaagagcttcaggatgagggaagacaagtgcttactcatactcttcaatccctctgaaaaggcatccttaattctgcctatctttaatcactagttttctcatgatgctgagaggctgcccaacttctgaactccagtcagtatccacctggctcctccatgctttgcattgcatatttgtttaaatttcatctgctttgctcacatgctgaggttttcttgtctaagggtattacacattatagttaggtaggacaccaaacttaaaaaaaaaaaaagactacttagcttgatggagaatatcctgtgtatgtttatcttcttattggtcattgaataaagtactgttggccaatgaagaagcaagttaggtgggactaggagtcaaggaggattctgggaaatttaggtaaaagaagtcttgtgatacaggcaggaagtgacatagcaggcagactcatatataagcaagggcaagaaggaagtcattccctttttctcttcctcctgctctctactctggagttgccatgtgatcctggcaagagaagacgccaacagctggtgtctgataagtctttatggttgatacttaagtctgagctagcaaataagaaatcctagtcaattggccagcagcattgtaaactaatataagtctctgtgtgttacttgggaccttaacatggccgcgggtggaactcgggtggcctggtggaaagcacccacgtggtggcagagctcgggtggctgtggtggaaagacttttcattacattagcagataccatattttctgtttctgtaattctactttgggaaccccaaataaatgtacatactgtaagctagtgtcaataaaataaaaagtccgtgggaagtaaccattttcctttttatcagtgccacttctttgctgtaaagttgatacttggtgctcagattcgaaggccagaaataaacagttctatcaaaaaataaaaaagcacctagcctatctttatcatactaggttccaggggcatctttggttttagaggccccaggtggacatggtggaaagacatcttccaaggatgtatataaccagagggtgataacagaaaacttcctggcatgcaagaacaacagactgagtgaatgctttcccacttaaagcctgtctcagtatcatacagtgtcacacatagcctatcaagctgacaggcaagatgatccattacagttggcttaataatagcttttctccttatggactatctaattggctttcttcttttttattgaaaaaccatattgttacttcttcccaaggttccccctttgtcacaatccaagtgtcctaatgtgtgtgtgcttgtttctttactcagtctcttttgccatgggcctgttgatcagaatttctgccactggcacattaacacagtaccaagagaacaagttatctgtccttgtcctttgtggatattttcagaacttttcatttaaaaacaaaattttagaatcactttatgaaattctattattttatctttgggggttttgatgaagattgtgttgaatctactattttagaagaattactagttgtatatcccatatctaaaatgcttcaaaccaaaagggcttcagatttgatagtttgcctatatatgatgagatgccctcaggcctgacaccctagtctgaagaccaagtttatttaagtttcatgtacaccttatgcacatagcctgaaggtaattttataccatgtttttaataatgttctatacatagccaagtttgatggcccagaattttccactagtggcatttcatttttagatccagaatggccaacttacaaatttttataattatgatcccagtttctaatctagatttatagtattttcctctacttattagatcttccaatatgtctcatgataaatggttacatttttatctgaaaaggccttaggcaaccttttatttggagtattcttgagccaataatattttgttgtagcttaaaattgagtctctaaaatactgtattttctttgattggtgacatatgcaaaatttgatagtttatgttgaatattagccagcaaacttctatattcaactgtgaattataatgatttatgtcttattcttttggattttctacataaacaattttacattctgtaaataattatatttttctcttatggttttcttcctatttttctttgtcatgacagaacatacaaccaagtaattttcaaaaggcaagaagggggttgtaagatggctcaatggccaagtacttgcactggagcttgctaagtttggtttggtacctggaatccttgtaaaggtagaagtttattgtgcatactccagtatgcacaataaaaatacatttgaatgaaccataagttgaaatattggatagatagtatatttgtcctactgatagggctagagggaaaaagttcaactttttactcaggaactgttacaaaggtgactcttcctgcaaaaggcctcatgaatgtgagaatgcactgtttacttcgaaggcttcatggtgagtgggtattgactttagtgacagtgtcctttccgttccttgggaagcatgcgttgatcacaatgctcatattttatttagaactggcatctgtgttcacaagcgagagtggctggcagcttctccttctccctttgcacttgtcagtgtctgtgatcaggttattctggtcttacacagtgatttggggactgcatcctgcattttatattttggaagtatttttttaagcctataataatttcatccttaaacatttggcaagctcatcagtgacactctctgggtagatctagtacaagattcttgacattctgtgtatacatatgcaggctgcattaagaacacattcacacacacccatgcccctcttgtccctctcccactctgctgtttccttcttgtgagaaggattttaaccaccgaatcagttttgaagtcccctgtccccagagtctctatgttttgaatggtaagttaatttgcctaggaatttctccatctagaagttttaagtcttgacacagcacttccttttcatcctaatgtcagtagaatctgtagtaacaactcccttcccatggccaataactaactattcacgttctttcttcttttcctacatcaatcctaccagggccctatctatgttatctcctgttcagaggaccagtttttggctttgcaaattggcctttgtgtttgtttacttgtagaagttctactttcattgctttttactacctctttctagttcatcttggtttagccttctttcctctgacagtagatgctttaaaccattgatttttcactgatgctatctacttttctaacatattcattaagcaactgtgtgagctgcagcccagttttgacttcttctaggattattatttactttctctctctctctcttcctctctttctttctttctttctttctttctttctttctttctttctttctttctttcttggtttatccagacagggttttgtaatgataaatctttccacaggctgcccaaaccccgctgccatgtgggcacccagaataacaaacagagtcttatattagtttacaatgctgctggccaatgactaggatttcttatatgttagttcagtcttaagtatcaaccataattgtaagacttatcttatctaggacaccttctgctagtgccctctcttgccggtggatcacacagtgactccagagcagagagcaagagaaagagaaaaagggattgacttccttcttgtccttgcttatttatgagtctccctgctatgtcacttcctgcctggatcacaatacttctttactacatttcccagaatcctccttgactcctggttctgcctaacttgttttcctattcgccaaactgtactttatctatcaaccaataagacaatcatatacacagaaggactactctcatcaggggttttctgtgtatccctggctgtcctgaaagtttctctggagaccacgctggtcttgaactcataaagatctacctgcctctgcctactgagggctgggattaaagaagtgcaccaccactgccctgcctgttatttttttttaattcttacttttgaattctttggtagtttatctctcaattaccaaaagtcttggaaattctatacagttttagtaacctatagtataatttcattggtttaggagactagcctgttgagaagtttatgggctgaaagatagaaaggaatatgtgtgggccacgaacatagcatggttgatacctttaatccaagcatgtaagaggcaagaagcaggaggatctcctggattccagagatctagcttggtctatatggtgagttctggtccaaccaggccagggctatatagctatatagtaactctctctctctctctctctctctctctctctctctctctctctctctctctctctccctccctctctctcttctctctctctctctctctctctctctctctctctctctctctctccctctctctctctctctccaaaaaagatgtgaccattgaccatcagtttctcttatgtgtagtttgagttgttcacatctctcctctttctgggagcttttccccatgttaccaagaagtgaattgcaaacctctcacagtgcttgctgacttgtggttttcacttcaataatttcagtgcatggcttcctgtattttgagcccatgttactgggcacttgcaaatcttaacttgtaattttttatagtaaataggacattttaccaataaacagagtgtcattactctaaaggccatgctgtttacactggcatagccatggctcattccttcaggtgagtgtttgaaagagtattttttttctttaattgaattttctatacattagcctatattgagcaatataacttcatttttttgtttattttgttttttttttgtttctgttttttttctgagataaggtgtttctatataagccctggttgtccagaaactcactctggagaccagaatggccttgaactcagagatctacctacctctgcctctcagttggattttcttatgttttcaataaattcttcatatttctctttcaaattgaattctttctttttgaaataattacatcatcccactacttccctttccatttcctaccaccaaatccacccatataatcatcctgctctctttcaaattaactgcttctcacaataatatgcatctaacaagaattcataaaaagagaaaagaggctatatatatatatatatatataatatatatatatatatattatacacacacacccctaagtacaatctgctcagtctgtataatgttacttgtacatgtcaaattgatttttgattattttatggtcaatacaattactgattgagttaaagctgccactccattttgtgactcttaccccaaattggattttctcttgaccattcaaatttttgtctctagtattgtctaagttatgatgttttcattttttttaaaagggacttaggtataagtaagaacatgttttcttgctatattgtattttaatggtgcttgaaatgccatcccatccctttctggcttcctctattattagcaaggagaagtaaagtgactttgtggtgtcctcatgctctgaagggcttgtccttggtcctcctcaggttcagagcagtgttaaggtattggtttcttatcatctcccctgctggggatacacttagcctgagcccttcttgatgcggacagctccaggactgctgtttttacctctgtccctctctgtcccatcatgctctctgattagaacttctcactggtgtccctgatgactctatccatttggctgtgctttccatccctttgggtctacacgctgccttctagagagttccttcttaatgtcttccatttcataaatttaagattcagctcctttaaattttgtcttaaactcatcttagttttcaagttttaattatttttcttactatgctaaactaaactttggagttttccagtttacttctgttattttcagaattaaattttattccatagcaagcccagctcttttgtgctgcatatatgataaatatgataactcatgttttggggacagcttgctgtgatttctgttcctcctatgactcatttattgtgtcctgttgctttataagcctagtaggttttcatcatcacatgctggatattatagtttacaaattatctggaagaagattttagacctggtgagatggtatcttcattccaaggagctattccaagtagcagtgtgtgttatcattccaggaatattgtaatataattctaacattggagtttgcttgtaccattaaatgatgcaaagtgatgcagagcttattacaaattcatgcaagatggttgtacttgaagtaattcttcctactaacagtttggcttgggttggggatgtggcaaaactcttgtgcaaggctctgggttcattgcctatccctgaagataggtaggtaggtagatagatatatgatggatagataggtagacagatcggtagatcaataggtagatgatagatagatagatagatagatagatagatagatagatatgacagttagattcttggctttaaagggaattaccccaagaacattttaatttccagcttgtttgtccagtcagaagataacagcagaagctgcttagcaatgtagccattccaccagatttgataaaagcccacaggaagaaaatttattttgaggtctgtgttctcccacacccagtttcttgatttacattttttacccccaaatttcttcagtgttctgcctttttttggtgctttcaggaaagtattcttatacttcaacttcttttgctgccttttacaaaagggttgcctcaatcaccttgttagccactgttgaatataggcaataaggtatttgcttaaatagattacttagaatctgtaaaatgttgcttagggataaacaaatgatcatcaaaactgttaaaagccaaaagatttgggctccttattggttttgggtggaggtaatatttaagagaaggggatctgaagggccaagcagacctccatcattcatgtacatgtctttctcacattgaattttcaatcatgatgaatttatgacagaagtcactcaaatttgcctattctcctccttcacattttgccaggaaagcatcaaatagctaccaactacaattccaggcttttataacagtgtggctcactacctagagaccacaggatatgtagataagtagtcaatacttacaaccaaataatggcagctgatgtcaatgagtagttactattccacaaatgatggatgctatgtgtgtcctacctgccatcccatttgctctctatgacatcatgacctatttaatattaccatccccctttattagggaccaaaaaagtcagtcattttcctgaggtcacacacatggtgtgtggcagttggcggcaagatgataaagccagagtccttggagccaataatgctattctatccctgaaaatcagggaatattgtgtggacgatgagactgaggaagagtggaatagagaagggaggggcgaaggactggagtatcatcttgggaacagatgggaacagcagaaaggagcaagtatgcttacttactgcagaggaccagagtgtttgtagccagtatgtgttgccagttagccagagtccaccaaacaagcaggtagaggaccaaagtctgataatcagagctgcttgagtttcttctggaaatagtggtgattaaagccccgaagccagctgggaacagcagcagcaataacagccgtggcagaaagtgagtgatacgatggcgaacacctcagggagagtgaggaataatgtaaaagctagaggaagaaatgagctgagctagatggaagggactttagagaacagtcagatgacagtgcccgagaaggacagagcaggttggcagcactctctatcctcagagaaacagaaataatgatagcaatgaaaacagcagcaggcagagggactggggaggcgacccagagagaagaagaaaggttggcaggcgcttggcactttatctacctggggacaacctcatgtgtcatttttcttcttcctgtgtctgtgtggatcgttaggaaataatcagcccctctagagatcctgcgccttgaatgtctcttggactgtcactttacctactatgcagagtctggaacgacgacagaatagatgtcctttgtggggtgatgaatcgtaaagatataactaggatgtagcatttggttttgtacttggtgcaattaaatgttgcatcctattcaggcatgtgattcacaaccaagcgacccagaaagtatctgaaatagtgggttctatgccaacctccatccctgtcttattctgcgattaagtggcttcctttccctagagagaaaagagattgcactagaagacagctcctaagatccctcttagtgttctgattttatcacttatatttgtgctactgagggaaataaaaaaataagaaagaaaaaaccctacttagaacaagtgcttctgactgtggtttagatttctcattgactcttcatagagacacatgtgtgcctatacacacatggacatgaaggcacgttctgtgcctgcttacaagttaggacccatgctgtatcattagcagaatgacctatttgctaactatttcaatgtttcccagttttttacatgtcacatcaggaatgtgacataatggtatttgcagaaactctataagggctcaggattcctataaaattcatctctaccctgccatccccatcttacctcaaccctaaacaggttctcatatctggtcttggtgacacacctgctccaacaaggcatagctcctaagtcttctcaaacaacgtatcaactggggactaagcatgcaaatatataagcctagaggggccaggctcccttaaaccaccacagacagtgaatcaaagttgcttagaggtaggtcactgtcaccagaacttttcagaaatgtttggaatgtgaatgtgacaccttgagaatcactgcacgagcactgtaagagtaaagacaattcctaagacctaggtatagttcttttttgcttgtttgtttttgtgagacagggtttctctgtgtattcctgaatgtcctagaactcactctgtagaccaggctggcctcaaactcaccacctgcctctgtttcctgtgtgctgtgattaaaggtgtacaccattaccaccctgctcaagtacagttctttcttctctctctctctctctctctctctctctctctctctctctctctttctttctttctttctttcttggtgtttttgagacagggtttctctgtgtagctttggagcctgtcctggatcttgctctgttgaccaggctggccttgaactcacagagatccactggcctctgcctcctgagtgctgggattaaagacttgcactatgacctcctggccccaagtataattcttaatgtatagcaaacacttgataaatatatgctgtatgagttgactacttcattacttggtagcctgggatagtcccaggtcaaatcaaaagactagtcaactttcaaatccatctttcttctcaaaggagctatcttgatagtctttcctaagtctcctttacctttctgcccttctcttaccctgcaattgtgcttctcctaaatcccagtcactatcgccaaatccatctcaagatgttaacctccaacaatgatcttcatgaaagtctccagtgtgagggaacaatagtcaggtggacatgtcagttctctgggtctgagatggctggtttgaaatgccacttcactcatttcctcattgagtgcaagttttctcacctatcagattatgacagcagctctctccgagcacttcagtgatggctagaagttagtaagagtctggcacgtttatagagagagtcacttttcagtttgggaaggggtaaaggagcaaacactgataaactcaaaggcatttatttaactgctttactagtacacaatgctctccttcttccttgttttatgttagtgttctagaatcttctcttctctttctatttcttccccaaaataatgtctcagtatttgggaatcctttctcaggtaatctacttcacaactagggcttagctttgtcaacagggtggatgtcttccttgcatgtgtgtgtggttgggttttggccccttggttggaaagacagtaaggacatgaggaacacatgaggaagcataggttccaggctttagcactgaaaaactggggactgacatgaacactacacaggtaacattactaccacccacaataactcttaattgtagactacatgtatcgaggtacaagtctccatctctaccctttatcattttggggataatgcatttcatagttcagattctatcatttgaaagctgaaagtcatcatcagggatgtgtaccctggaatctcccatctcaaacttttactccagcattaagtaatgaggtgaggttatcaatgctacatcttatagtgagctaaacttgagaaaatgttttaaataagtaaatacatatacttacttacacatactcatttacatgtacccaaatatatccacttgagttctttgtaagaatattactttgtgaagagagtacgagctagctaccacttactgaattcacacattctgaatatatatatatatatatatatatatatatataatatatatatgagaaatgttctgacttctttctccatgttgtattctttggcatatgtgaaggtggttttgaggcgttatgaaatatccagggctggacaaggtactccttacagatccccttggcatgccttcataataaacctggtaccgtgctcatagatccatgccaaaattatagtcctctgaaacttctgtagaacgatttaaacagtttttgtgccttgccaccaaaatgtgtgttcgtttttctacacctccacacctggcagtatttcagcccaacatttgctacagtattttgagttcgtcttgtttattttttctcctgatgtacattttatgtggggaactgaagttaccacttcccatatattctgctgctgctcagccctgctcccaaaccatactcttctcaattaaaaagcacttaaaaggaccgtggacatcagggtttgggatctttttccttccaccttggtctttgttgcctggatccagaataacatttgtcagatttcagatgaatagcatgaaactgcagaagtatgctgaaagtgagcatttgatacgaaccgttactccccggaatctcatattttttgaaaaattgatgtaagcattgcaacatggtataggatgtaccttgcctggtgcactgttaaaaaaaagaaaaagaaaaaagatgccatgtggctgcatacctggagtccagaatttgaagagagatggcctagattagcagtacctttacaaggagttagtaccaagctatcagtaccaatgagaaatgtgttggaaatgcagagtcctgagccacctagacttcctgagtcagcctctggaggtcagatccagcaatatctttgtctgttttgtcctctccctgcaaaacagttctgaagcatgaagaagtgtgaacctcagtggtgattttccaaccttagctcaacttgttggcctgtgcctggggagacgtccccagtgccttagctttctgctatcctttctctattctccttacccctacccgcaccactcaaggcagcaaggcaatcctgcaggggaacctagcctctacatcacatagatgtctcatacttacacaggatactcttggcagcccaatggtttggaatcaattgtgtgaattctctgaactggctgacccttacaggtaaaaccaaaagcagagaaactgggccccaaaactgtgggccccagactcagatggaaaagaccacagggccctttgttctcagccatgggcttttaccacaaatgaccactctcccttctgtgaccctgtggcatgctacccaccatcctttctcctcctccacacatggggtaaggacacggaaaacagagattagggaattaatttgggaaactggagagcaggacacagacatttgtttctgttgttacctgatgctcttgagaaactgcatgtttctctttccccgtcctgctaattccagccttggttgagaaaaggactcttcactttgctgtaagtatgtgttagtcatgtaacttgcatttctgttgtaagaggaatattgccagcctcttcaggttacaaataatggaaactcaccataaactcatggaacccagcaacaggattcatcaagagcttataaaagggtcaagctttgggaacagagtgggatgcgttgagcactgttgggcctttttctctggctgtggttggcattaccactggtctttacctttgcttggaagtctggcttgttctttctgtttttcaactggaagagaacatggttgcaagcagctgtgaggcagcaactcctgaagaagaagacaggatcttccccctcctgtgtgggcatgaatcccagggcagcactctgattggaccaggggcatcgggaaggtctgggtcgtgtgactgcttctgaagaacagtttgtagataactctaggactgcaaagtgttctgccaggtgataaaacctggagaagcttgtcagcaaggccaagtcaacaaaaacaaaaacaaaacacaaacaagcagaaaaccaagctgagactcccacagaaatcatctgggtatagtgagttctgttatacaggccctgagaggatgcttgtatactgataacgttttttcacttacaatactgccacataaaaataatataaagatgtctttctaagtacaaaacctgatccataaataaggatgtttttaccgtcccagttgaatccaacaagaaatgtagcttagtctttacccactagcaaaatctagacgggcagtgaagctcacacagcgagggattggaagtgttacagacatttgcctgcccttagagatctccttgtctggggaattaagagtcaagcaggcttggaatgcattccatccatcctcatggcaattgccttcaaggcaaagacagctgagcagctgcatgggagctgtacctggctgcacacagaaatgcacagtgctactcaaataatgtccatgctggttacaacagtatcaatttcttctcggttcctctgatcctaaatagcgtttcttctaaactacctgtaacaagagactaaatcttaaaacaatgtgcacatgaaccagcagcatagtatttacagctgagagatgcaatgtctgcaaagctgagcactccctaagagctacagtggcagcaacttacgaattcatatattgttacagattacagtaattgtttagaccagctcagagaagccaaacacagctcacatgcttaaaacaagcaatagactgcaattccatctttaaaaaaccctggttaggctggtacatcttatcaataattttgaaaactgtatttccactgagaagttataaaagaaataacaccattcaatttctttatgctctgcatcctttcagagccgctaaacataaaaaagccagcaggtgcagctgactcccttagcaggcctggtagaacgcctctcctgaaagaactttcaattacagacagtctctccagcctcctgttctaggctccctacagacagcagcagaataatacatgaagatgtatgacggggagacattacagtgtgctgtcacaggtcatgaaggagacactgaaatcttctccactgggtttttttctttctttctggttttgttttgtttccttttgctctttctcccattttacatttcttttcaattaacaaagaaggggccatcattcaagagtaagcggtgacagggtgtgctaattcatttgttcccagtatgctttgtaccatttccctcaccctttcagaaagtggctctcctctaccaccgagctcagctcagcgctaggccagatcagagaaagggcacacacactaacaggagaatggagaacatgaggggctgcggggaagtggggggaggggagggtggtgatgaacagctcagcggttcagtgactttgcagtgtgcatggagccctaggttccatccccagcaccaaaggaaaaaaaaggagtatagaattataaaataccttggactctttccttctaattctttttttggagttgtcattcttttggcaagtagattcacatacaaaaagagattacttttcagtggtgtctttcccactacccactgagtctgatagcatctctaaatttttcatgagggtgtctgattgccattttgcagccgggaatgacaataaagaaaaaaatcctcttttaattcaatacatttgatatgcacataatcccttcagtgtgaaaccttgcttaaagttgtcttcaatttgccatttccaaaggaggagtgagaaagtgagtgatcaaatacatttcttataaggacctggcacgtggtaccatgtgacagcagatggcatgtgaaagccgttgtgggaaatacggcccctgttaaacaggctgtgaatgtgcaaggttgtgcgtgtctcctcagagtgccgttcaagtcaccctggcatctgcaggagagtaaacagcctcttgttcactttcgtaactaaagctaatgtgagcgacctcgggaaagtcatggaactacaggtatactgggccagctgccgtgctgcggagatgcgcccatcagagctgcgagcattcgctccacggggcaccggacttggacaggccccggctgtttggaatgtatcagactattcaatagcaaggcacaaacaagtgcaatctcagaggctgcaagtagagaggcaaaaagaacacaaagttccccttttgggagtaaaattcctctttgtctctcccccaccccttgaggaccagctactctgtgcaaaggtggccccatccaaggtcctcaaaccctttgctttggctgagaatttcatgctcctctcttgattcacgccaaggaaaagctaaattttgctctgccatccacatccaaggcagcatgctaatgagaattattattaagcaatgtagagttggcaccagctcctgcaatctgctcagccgcaaaagcaggcagggcagaggcaggcagtcagaaaagcagatttgtggactgctcttctggacctgattagttttggtcactctcaacaccaggcaaagccaagtattatcgtaagcttcacaggcatggcactgttccctctcctctaatgtagcaggcctcttttaaagggggcttctccatttaactgccactttaaaaacactctattcctcacaaaatcgagtttctgcaaatccaataagcaatgtatagaaggaatcatttgctctgcattttagaatttcttttattttgataccccatccaaacaggctcatgttgctctcaggaagggaatgacatctcagagctctcagtggcatgacttttagagtaggctgtgacattttggtcagatggaaggaactagactaccaaccaatgcctagcagagggatctgaaatgagggctgtcacgaattagcctccaagcagttagaccaaactcatggggaagatgcagcctgaggcaataaaaggacacttatgcattggtaaggatgctttgtcagggagcatctccatttggaaaatgcttggaagcatgaggacccgagttcagaacgcatacgaacagaagttgtacacaacagcatatgcttgtaatcccggccttgggacatactagatagccagcttagctggatcagggttccccagatgtcaagtgagagactctgcctaaagataaatatataaaagaagatttcttttaaaaatgtgcactattccccaggattaacatctgagtttctgacctctttctggtctccacaggcatgcatgtacataattaattgcacggacacacatgtgcgtgcaggcacacacggagaaggtagttaggccggtaattttggaactataccaatgtaagatgttattaaggctgacagattacagccaccaatttctgtcttccccataggcctgcacagctaatggacactaagatgttttttaagcacctcagacacaataaatgacagattattgtcaccacatctctttttcatttcactatattttctaacagttaagagacctggaagtcagtcttttcttagtgctgtcactgcttcttgctgctcaggttgcatcttccctccttcggagactccatttctgtctacattgtgatgctgacctcttcctcagtaaagatctccacatagccacatatgtcatctttcaagagcacacgaccttgccttatcatgaccacagctctccacaatctgcccccaactagcccagagtcagatctagtcaggactcagtatacacatcacaatccagtcatgtggaacggcttgcatgtctacagaggagccaagttttccttgtgcttacattcatgttcctgctgcatcctttgtcagggatatttgatgttcattggttagacttctgtcttcatagtccaaagatgctttcaacctctgttttctttctaatgccttttctaatttgcatacctctatggcacaattcaatcacttcaccccatgtctctcatcatacctcccttctagccaattctaattattttagatgattgcatggtattcatggtattctacctgatggatacatcataatttatccaacaaagtccatattgatgggcaattttttgaggttgtccttaagattcccatttttctttgtaaaagtccatataatattctctaagtaactagacagatatcacactaaatattctgataatgctaatggaaaccctacagaaattaataacattaataggaattatagacattaatattgaatacttattatttattcattatgtattgaatacttattatatatatgtggatacaaagccgagttcatattttacaaagacataggattagacgttagtactaaattgcaaggtcatccaactataaacttttagaatgtgattctaattttgtccaaattactcttatttaacatctttcttaatttaactcatgcttttactttatatcattactgctaatagaaattcagagtggcttgcaataaatgcaaagtcagaacaaaaataaattggaaatttctcaagtttagaatctgcaaagctccccttctcattactttgtgtacatgagacatatagaacactctcggaaacactggactataggataaatcaatatcaaaacaatagtttacctgaaaaaagtttcacagttatgagactaaggtctacctgtatgaactgtacttcaaataccacatagagaaattgatattttgcctgcctactgggaacatgtattaatgtaatggcttacatcctcttctgcctgtctcaccaaccttgcacatccacagatgggcaaaaagttatccccaggcagctcttgctgtgcagaggagaaggtcagagactggagtgggaaaaaaaagacaagaaatgaagcagagacaggaagtctaagtgacaagggaaaggtacaaaagtgagtgccttggatttgcaatgattgcccagaggtacaggaagaacagcaacagggtgggttttgcaagtgtctatttaaagattcggtcctatgctgggatttctgggaaaaaggcttcctggagagacagaccaaactattgtgacctgtatcagcatctctcattaccattcacctgtccactgactgaaaactgagattccccagcccagcccaactctgagtgtaagccattgggaatataatccccaaagcagccttccaagaagttccctgagcttggtaatgtatattcagatgtgcttgtcactttctatcacatcatctgacactataaagtaagtctagtttctaagacaggtgtatgtaccagatgtatggtttgcaaatagtgtatgactatttttaaaacaaaatccatattacaatgaacttgtgttttttattagttcctgaattaccacataaaataagtaggtattagacaaaattagcaaattatataactgtaagtcataacaatttgcaaataaattgaacaatactcattgattacctacaatactatgtgtcaggtctccatgctagtatggtttactgaaaagaaaaatcttgcagaattgtcatgagtgacttaatattatgatatgcacatcctccattcttctgatttctcctggtatctgtgcttttgactgaaattatagaattacatttatcagtctttttcatatataatatgacatatgactatatataataggcttagattttttgctaataggtcagtagcagtatgtgtgtcaatttctgaaagtttcttaagggaagaagacatgctttttaattccaatttttccttccttctttaatgttacaacctggatctctatacatatctttggtagtttgggataacagaggagaaccatagctgagtcatgaaatagaagggacctgagtcattatctgtagaatacatactaaccaatagttacttttttctagacttacaaaacagagtaaaaatagtatataacaaaatcaccatttgataggatcaggggactctatctctcaaatttgaagtaaattataacatatgacatttattagctttcaaggcaagatgctgtatgaattttgttgtagacaagcatgtttagatataaatataatgatatgatagttaatctactgtgttaagaatagtagatttcatcttcattttgaacttttctgggttttctttttagcttaagaaacttatttactcatggaggccatctagaaaatggacattttatctctcttccaataattcagtaacaacttcctaatgcccatgaatgggatttccatacaatattctcttctccctactctgttccgaatgctaaggatgattgataagaagcatgctggaaataaagaccccactagatgaaacacattctattaaggtataaatatataaaaacatttttgaacattcagatagatattagggggtgaggtgggaccgggaaatgattcagtgagtgaaggtgcttgccaccaagcccaacaacttgactttgattctggggacccacacagtagaaggaaacaaccagctccagcaagatgtcttctgatttctatatatgcattatcatgtgcatacatgcacatgcacactaacacacacacatacatacacacacacacacacacacactcactcacatacgctaaagtaataaaatgcaataacttttttaaaggtatgatatcaaggagagatacttaaaatgtgggtgtggggcccttgaccacaaaggaggaaatgactatcatgtatgctataaaaacatatttgacttttttatatgcttttattaatcgattctcagaagtatgctttgtaaactaatgtgtgttgtgtaggtcatcccttcattgttgccttgtttctatcctcactgggtgttttcatacaggaaagcttcctgtaaccatgagagcctcagctaactaagacatgagtgttacaagcttgctgttgagtgactcatcttgagacaacatgcagacatgcttattcaccctaaataaatgtcaccaagaaccaaaaaaaaagaaaaaagattctgttcaagtctatcttggagaacgaatcagtttatggaattagttcctgcagtattgatgactcacagggagctgctgtagagaagaagtctcatgttcacccctttaacagttgtgactgcaatgtctagagataggagatgtgaagtgtagtggtttgaaagaaaatggcccccaaagggagtggcacaattaggggatgtggccttgctggagtagatgtggtcttattggaggaagtgtatcattgtggaggcgggctttgagatctcatatatgctcaagtcatgctcatcaagacaatctgcttcctgttgcctacacatcaacatatagcatctcctactctaggaccatgtgtgcctgcatgccaccataataatggactaaacctctgaaactgtaagtccagtccctcaattaaatgttttcctttataagagttgccatggtcatggtgtctctttacagcaatagagaccctaagacaaatatctggagatgggagatgcatagagaggttcttttgaaggccattggcttctactgaccctcatgaatatcctgagcctcttccatccttccacaagaggatgttaagaagcttgacactttgagggtcttaagtggatcatgatagctgcttgactttaagaccttaatattgatactctacctggaggaagcaactaccctataccttgtcctggacttactttgagtctctgaatttccatttatcttaggtctcggaaattttgtggtctcagagtatcttgaacatgatgtataattgaggtagcagagaagggcagcacactttgttgcatgttatactcctgctctatggtcccatttgggcttcaatgacaaagaaaaaagaacacaagaattttactcagagcaaagcattgaaccaagtgaaagcccctgtgagcttttgtaatcatatgtgctgtgtatccaggaagctggctttgtagggcaatgaggatatgtagcaaccacaggcattgtgtctgacttacccctgtatgcatcctgcaggaagacctttctggatggaaacctaaagctgatgctcctgcatactttctctttgactattctataaatagctctccctattctggttgttcaaacctccacacagcatcctcttgaagttcagcagtgtccaccccctgccaccaccaccaccaccataaggaattctgaaagaaatgtgttctactgcaggtagagcaggtatctcttacctgctcattcaaatgaaacaagaagagttagggagtggaaatttaccccacacaagaaggaagatgactgtgggtgttccaatttcaaggtagcatccttgtttagagagcatcagaatgtttttctattcagcttcccagaacatcagtgagaggagcatcccatttttatctaagacaatgtttctgcagttgggttgagaaaatgcctactatttagtgactggagattttctctttttttccttctctgactgtcctagaacttgctgtggacccttctattagtttattgagaaatattatctaggtcctgacctttgattgcttttacagaaaagattaatcaggctgaaaatggctctctccactgaagaggcagagctaagatatgggccttccctctcagctgtccaggccccttgccacctatggaccttcagccctggactacaggaacacttccctttcctctggatgtttaatagtccgttgattcatactaccattatcagataataacaaaatgaatcccacttggagaatttgcatcttaataggagactcttcccagtgagagcaggaggaggtggagggggttgtggaggggagactgatttttttttgaaaactcatttttaatatccagagttttatatgtgttagatagaagatgccaggcaacagatattctaatagttctaaggtctgtgctgtagaaaggaacagttaaccttatgaaccagaaagaaaattgagagagagttctttaaagtaatagttgggactttggtgaactcctttgacaaaaatttactcattaataaaatcatggtttctttttaaacagaaaaaatatgcacaactctcctgattcaatttgcaaagggggaaaggggtggattgaatgtacattgaatttactagaagtggtatcgatgtttggaaggtgagatagtgtagaataaatgctgtctgaacagttcctttgtattgttttcaatgtaaagataaaatacaactaaagaaggctggagtgaaacattgcagagactctgagattgcttcagtttgaccaacaggtgacatattttgatgaatcatcacttaccgggggcaaagccactcaaagacttccagctcccactcatctctccaatgttccctgttcccactctctgcttcaaagtttttctccagtggcataaattgctgatacatgaggctgtgtcttcactttgtagtttaatcatgatgtctcttctttctgaatgtcttcactcctaagccttgtctgatgaatccctactcatccttccgtattcagctcccatatcatcatctccaaggaaactatctttcccccatctccagttttcaggtgacttaagtatgccttgtagctaattccaaaatatctgttccaaaatacctaattccatcattgcacttaatttattataaaacttccttcaggctgagtctcatctgtgtcactttactttgacatccttcaaagcaaagaccacctcattattttttttaattctctaagctcctgggcccaccataaatgttcattgaatgaatgaataaataagaatgaataaatgattcactgagcctgataatctgagaagagaatccaattttggtaaatgagatggctttcttaatcatcacaacaagcttcagactggaatctggttcctctgagttcagttcacttcagtagcttgtttgggtctctgaaaacaaaagccaaaagccaaggaaaaagccatgaaatggaaaccattagccctgtaggcacttttcattttaaggaaattaaaagctggtttcctggatttaggtggcagtccttcaagaataaaatgctgcacttaggatactcctgctcagatttatgcttggtaaatttatttttcatagatataaacaagctcattaaggagtgtcaaaaacttgtcaaacatcaaatagctgttccataaccacattttgaagtttgggttattatatacagattgcatttccataaaaaaattctgcccttaaaaatatgaggaagttgccagttaaatctttaaaattctaaacaatctgaaaatctttagagccactcttaaattttcaaacctagctggggatagatagtgcatgaatcaatattactacgcccacttataattatcattgtcacttccacaaaggagaaaaccaggtggggaaagtttggattgttttcctccataattatttaaaaacaaagtgttgtttgaaaaactgtcagagggtttgctgagtggggggtgttcctgcttcacccagcctccagaaagattcctgataacttcattgacaacagatccaataatcttttctttttccccaaaggcaccccagttttcatttttgtacacattgctctctcagcatgggctgcaggagcaatcctattatcttacttatggttcattcaagaatgaggaaaaaggtcatgattgtgatcagtgaggtcaggtccctgtggggagtttttggagagggaagcttccaggggaggtgagggaagatgctatgggcagggtgaattatggatgcctttttgtgatgtcaacaaatggaacaacaattgcctttgggagagagaactgaaaaccccagagctgaccaacctgaagctgggcctgcttctagacttccagttctttgaggcaacacattacattattatttcaattgctgtagagttgataactccagcaaaatcgaaagaatctcagttaatgcacaacggaatccatgattttgattgaattactaataatgcatgtataactcttaagaaatggattgcattgaagtaattcatctcttacccttttctctgcattactttgaaataattcatctgtttttttttaattgagtttaactggtttggaggcaaaccattacgataaaacaacattctctgacaatttagctgccgcctgaataatcatctctttatttcttcattttaattgatagtctcataatatcctgagacttttttgacccttgcatatcaggactatgagtttactagctagaggaaaacacttgtcagtatacagagggactgtggccctcgtgggagcccagagccttcagttaccaagatgatacaattggttttgcacattctcatggatggtcagtgaaactttaccttccattctcatgaaatacccctcaactttaccctgaaatctcaaggttactatagtctcaggttccttctaggtccccattggccccaaatatttaaaaaatataatgtcagcaagctaaatacttaattcccagtacagaaaaactagaaatcaggtggtggtttaatcccagcactggggaggcagaggcaagctagtctttgagttcaaggccagcctggtctatagagttcccagacagtagagctacacagaaaaactctgtctcaaaccattgagaaaaaaaaagaaagaaaaacgagaaatatatgggcatacttgtgagcctaaaaagattatctatttggtcctattttgttgttttgttttgtttttgtttgtttgttttcaagacagggtttctctgtgtagacctggatgtcctggaactcactcggtataccaggctggccttgaactcacagagagcctcctgcctctgcctccagaatgctgggattaaaggcaggtgccaccaccacccagcttatttggtcctatttttaataggtatcaggaaggtggcgaaatgcaccactttttattgaaataactgaagttttaaagtctaaataatgtagttttcattttgatacttacatatgactgtgacaataatggtcctaaattgtttttttttttttttgtattctgtgagctaagcattacacttaactcttgccatgttatctcatttaatccttgtaacagccttttgaaacaggtccttgtatttctttcattttgcaaatgaaaatattgactcttagtgaaattaagtaattttcccaaactctccagagcccatgcccttaatctttattctggtcaacagacttgttattaacagtcaacaatatgattgtgttgttcaaaagccaaagaagtctttaattgctgttggaataatgtactggttggaataaaaaaatctactttagccaatatgattacagctgtggtttatgttaaacaatggagttcacatttcagatgggacaatagaaaatacaggctggataagccatgcatcgaggcaaaatacctgtgaggtttgatgacaaaacaaaacatgtgcattgaagaaaatggaaaacatagactatggaagggaaatgctgttgtcatcattgtgccatttttagcacctgctgaataccttctgaatgttgtgtgtgtgttgcttaatcaagaacagttcctttgctcagttgtttccaatgactattgaagaatgaccactactgaagagctgactttcagggtgccctaatttttaaattcttcgggttgaatgtcttttactcaatttctgggagaacttttgttattgttttgaggtgggctcttgtgtatcccaagctgaccttattcaccatgttaccaggcctgtgctggcacatccagattatgagtgctcacacatgctaggcaagcactctaccaaccaagacacactcccagccctttttgaaaaacttaatagattcaagcagaacgtgacgaatatgtgaaattgtatacctcgtgttatattatgtctgagacaaaactcctaacccattcaccactaatttgctgaaattgacttcctctggagccaaagcaatctgaacttaccattgtgcaattctctttgacctcttgtgatcagagactattgtgtgttatcagtttggcaccaagtgaatgtccagtttcccatctaaaaagtccacttgcccaaggactttaacacaaactttttcttagataattaagacagtccatgtttgtaaattgctgctgccacaattctctccttcctcgtattattatttgccacttaacatatcatctgtgtttggcaatttgtctgagccttatctcctgtgcttatgaagttttctatgatgtttgcaagcatttgagttaaacagtagcacaactaaggaatgaagttgctggatttgcttgaatgccccaagagaggaaagtgttttcttcttgtattagtgttttcagcctgtggatcacaacccctttgacagacctctatctccaagaaatatttacattaggattcacaacagaattatatttatgaagtagcaacaaaaataattttatgttgggggtcagcacagcatgaagaactgtattaaagggtcgaggcattaggacagttaagaaccactgtcttccatgtttaaatcttatcctctggaaaaaggaagtgtgtgtgccatgcgctatactgaaggaaagtttcagagagataaatttaaatcaaggcaaggaatacattacttgtaattgaagacatacattaacagaaagttttcctcacaaagtagtaaggaaatatttgtctttagaataccagaggtttagcctgtcttgcttgttagtctgtcacccccccaacagacattttagaataataataatacccaatatctgcagatgaatctaatatgctgctactatagagacacactgacacgtcagacaaacccgacaaagctcaggacagcaagaaaaaccagtgttcttaccatggctggcttcacacaggggtgacagaaatgacttctgggggacatgggaaagtgaatgattctgtatgatagaaacaaacatttaaaattggtcttgggggtagaagagatggctcagcaggtcaaagctcctgctaccttgcctgacgacaggagcctgatccttgtgacctgtgtgttggaagaagagaattgacttgcactagtttttctctgaccacacataccatggcatgctatgcccatagacatatatgttcatacacatgaacacataaataagtaaatgtaattttaaaaataatttaaagccagccgctgggctgtgtacttctctttacccagacacagctcctgcatttaggtgactggcagcttgacacagcatgcttcataaaatgctagatgagctccgacgattactgaatgccattgccttatctttctgttcttccccgtttcacattttcttcctctctatactagaagagagctctaaactctggactgcagaacataaccaacccaaaaactaaagtccaaatgccttgccatgtgacacaaagacaggccccatggtggctgcattgtgtctgaacaaatgacacatactcccatttgcctcaggccaagcatccgtgttctgtagctaccaacatcattagtaacagcagcacacacctccaccagaccacaccttctacccatgtttagaatattgttaagaatgacaagttgggcttggttcaaagtgattttttttttttttatgaactgccaaccctgctaaagtgtcaagggaaacaactcccttttacctccttgctccttttttttttttttaatggacatctgctgattgatgtaaccacagatgagttctaagcccttccatttgttgtcttttatgttactttgggtacataggaacttttacataagaacatctgtgctgtgtcagaggttaggcttccattttgagctcctactacaatcactgcatctccttgagttttctgtgtggtgggtctgtccatgacctgccacgcttgccaaagagagaaaagagaattgtagtcagaagaaaacatcatgaagaagataaaaaaaaaaagaccgtgttgactcataggtgacttattggtagtttaaaatgatgggcacaagacagacaaatacccctttctccctttctccccccgccatcctccccccaccacatacaccacgatatatacacacatgtgccacatacacacacacacgcacgcacgcacgcacgcacgcacacacacacacacacacacacacaccacagtacactgcataaggatccccattcttcctgtctgtcagcttggctgtaatctctgtcctgatgtgattgcttacaaatcaaaagataaattgctagaggggtggaatcccctcccctgcccagttccatgggagagagggaaatgatctcttcccgactgtggaatgcaagtctttctctaagtctaattgtgtcctttgctttgtgcttcccgccttgtctctccaggtggatggcagactagacaaagctggcttgttttgtttgcaggcagctgtggagatagtgacatagcaatgctttgcttcagatctacactaaggtatcattttgttatcatttgagactcattttcctattgttccttattgctgaagccacatcatgaactccgggcagatgtgtggcatgaaagaatttgacactctggaattacagtggcaaatcctactgcaatctctatgtggcctttacattttcttattgttgtaaatttctagtcccaatatgtcattttagtgaataacttttaaattggtttgtaccactacatgatacagctatgtttctttgtcaaataagatttttgttacaacaccttgtgtctggaaataaggccgtgttacacaggtagctgatgtaatcttttacaagaatgacctaatgagatcccaccatctcatcagcatatgggagtctgcaagtgtcttatttatttttgtgctgttgtaagaaaatacttgaggctgagtatttcacaaaggacagaagtttattttctcacagtctggagggcaggaagctcagaatcagaaggatggtggaataaattgtcctatgaggactgctccctgcttgttgctgcctcctctggagaggagagttctgagtcctcatacagctgaaggcagaagaagagtgtggaatgctatgtaaagcctcttgctgagggctttcatcttattcatgaaggaggagccctggtgccttagtaatctctcaaaaggcctcgcctcttcatagcctcttcatactgccatcatactgaccctgactttgttcttggtttgttcatcaaaccaagatacctttgttgtggcagctgtccataaggttggggctgttttctacctattcaagtttcagttcaatgctagggtgactcacagaaatcagctttattatagcaaaaggatacaaatcagaacctgctaaagggaaaaatgcatcaggcaagatcctcaaggatgctgttttccaaacttccatcactctctggaatactgtcccctcccagcaagcacattggcaggccacaatgtatatagcatggccaacctccaaaccaagatctcctccaaaccttggtatctagaatgattatttagactagataactattcatttgcctgtttttcttaatcccatcttggcccatgtcaaccctaacctgagaaagtctggttcaaagtgacatgttccaaaatcccagtcacaaatcacattgccagagtatttgctggtgaaagcccccagggaaacaaggacacttagatttgttaggacttcccaggcctctagagacctcccagtagaaaggacaatggcttgagtcttccttccttaactaatgttcattcttaagtatatacatccgaatcctgatatggagtgtaaattcaaaatacttgctaaacaattttatccttaattctacatagaatttttaaaaattactcaactcaacactggaaattttaaaatttagcataagaactgatgattatgttctgttcttgcatgacaaagacaatgtatttgtgttaagaattatataaaggagccaggcggtggtagcacacacctttaatcccagaacttgggaggcagaggcaggcagatctctgtgagttcaagaccagcctggtctacaagagctagttccaggacagcctccaaagctacagagaaaccctgtctcaaaaaaaaaaaaaagaaaaaagaagaaaaaaagaattatataaaggaaaattctaaggtggttggccttggcagtgaatatgaccaaattattaatgaaatacaaatagcaaagaaaaagaaaggggaaaaacaaccatgacatctacaacaaagtatgataagtgttttcaggtcctaaaatataaacatgtggtaaaaacaaaacaaaacaaaaattccacttgtgcaagatctgtcaacatctgtgaaggagaaaattggaggtgtagtgggtatcctgagactagaactgcaaagccagcaacagatactccatggaaggtgtcagagcatgatctgagaacacattctgaagcagaaagagtttgagttcaatgttcaaggacagggaagacagtagaatctgagatgttagattcatatggcttctaggacactaacgactaaaatacccacccaagctgctactgggacaagatcacatataagagaaactgcttgaaatagacacccatttaaacccaactgaggtggtggagagagggaagagaaagtctagatcaaataggaaaggaggtgagagctaagagcctgtgtattttgttacttctggagaaaatagaaagaggctctggagctaagctaccacattttgagtcactcctacattccaaacttctaaggaatgattttcactacaatgaggaataaacaaggatctcagctgaacataatgctgttgtatggagaaaactaaagagaacaatgacagttgtggacatggagaaaatatgaagcagagagaagaaagccacaaggacatgagctctccaaatctgagtttgatgtcctcaaatccctgcccaagactttcaggtgccagtgtagcacaagactgtatctgggcagagaaagctgtgtgggggttccagagctggcatggagctagggaaagctgaggttcaataaacctcatgggccccagactagaactgccatatgaaagcttatacaaaatccataaaattgtccaaaatccattttttaaagaaaaaaagattgtctatggagagaagtcagagaaaggagcctataatttagaagaaaatcattcaataataataaggcgtatgaatgatagaagctatgtattatcagacttggatgttaagataagtatctcaaggatacaaagtgaaatgttagcataatgaaaggaacctggaagtctcagtgaagaaatggaaaaggtttttttttgggggggtgggaagcaaaggaggattttttttaactgaaaaatatagtatttgaaatgttaaaaaaatcactgagtggtcttaaaaatcattttgacaatcaagaagaaagtactgtggaatttatataagatagattaattgaaaatatccaatctggagacaaaaagacaaattgatagagtctgaataaggcctttggggacttatgaacaatagcaaaggggctggtgcctaacggaatagagcctaaagatagattcatactttagcaatcgtgttattttcctaagtggtgtcaaagaaattcaatgaagagaagaatagtcttccacaaacagaactgaaataactgggtatctgtaggggggaaagtaaccctgatctctatttcatgctgtacaaaaaaaacattaaatcagttaataaactgatgtgaatactataaaaatatcatttcagccttaggaaaggcaagtgactctttcagaggacagaaaactattagccacaaggcaaaatgaaacttaatgggttgagcttaatcaaaataaaaagcaataaaaaggtcaccattaatagattaagtagcagcctggcacagtggcacatcccagtagtctgagctattcaggggacagaggccagaggactgcctgagcctgggagtttaaatctagtctacacaacagggtaagagcctatctcaaaaagagacgagtgggagagaggatatgagtgaggtaggaaatggctcagtagtagagagcttgcccatgattcatatagcctgagttcagatcccagcactgaaaaaagtgaacaaatgtataaaagaattcatctcatcttataataaagagacagccctggttttgtgagcaaacctttttaaatattacatgggcaacatatttgagcaggaacttcagaatgtaatttttgcagatttttgataaagagttaaatgttctcaatgtgcttatttatcagggatattaaaaccacaatgaaacagtactacacattcattagtacactaatgaaggacctgtatgaaatagaactgatagaattgtgtgtcagtgtgtatgtcagtaagtatgtgatttgttgtaaagaattggttcataatgttatggctgctatgacaacaaacactatggtcccagcattctctcaggatggagctggaagggatagagaggtaatctgagaagttctagtctgaatctatgtgtaaggaagattttatttctactcagtattttactccactaaggctttcagtgagtctgtgtgtgacccctccaatgttaataaatctatttcatttaatccaccaattcagattttcatctcatccataaatactctcagagccaaaaccacaagtaatatttagcaaagtacctggacatcccatgacctcttctagttgacatataaaatcaaccattataaccagaatggatacattgaagagatcatcattccaattactggtgtggatacagcgtaacatgaatcttaaaagttatgtaaaactgcataatcatatagtgacatcatgaaataggtcagtgctttcatatttacgtaaaagctataaaaacatatgaacacaaaatacaaacaagaatattcatagcaggtttgttcataataagcaaactttgttgacagaaaatacattttaatagatttttctaatagtggtatatttatttactgaagtgactcatccatgaaaaggaaggaattaaatactttaatgtacaacaatatgaaggactctccaaaaccatgctgaataacttgttaggcacaactgaatgcatgctgcctgatgtattgacataatgttctaggatatagaaaactagtttgtgataaaggaattaaggccctgactggatgcggagtggacacacaacagtgacaagggagtttggatccaggcttcctgcatctcagtgttacatgctcattactgtggttggaatatcagcagcaggaaggatgtctgtgccagccagggaccagaaaatagactcacatagaaaactgacagactcacatagaaaacatttgaaggtgacaaataatttgccctaatttactaaaatggatgcttaaggtatgacatttcaatccatagaagtttgttatatagccatgaaaaaaatgaatcttgccctcttgcaatcccgtatcataaactatatcaaactgaaaagatctcatttccaaatgtgcaaagaaaaaaataaagaatttagaataaggcacaggagtgcagtgagagaggcaaagatttcttcaacagcacatagaaaacattagccaagtttaaaatatgaataatgctactattttaaaatttgaaacttctgttcatcaaaagatatcattatggatataaaaaggcaacctacacagtgggggaaggtatttgcaacacatacatctgaaaagtaactcatgggaaaagcagtttagaattttgcaagtcagttaaggttattaatgagaggcttgactgcattaaagcagatggccacatgaccactgcaagtgcaaaatcctgtatgactccattagcccacaggatccaaattaaagacatgataccatgccatgacaatgccatcagaatgactaaaataaagaggcagaaaatgccaagcgttggtaacaatgaaatagctgacaaaaaatggagtcactgatagaatttatatttggataatgggttttggaagtcttttcataagtgtgtacactcagggaatggtcacatactctttggctgagcagtatcaaccataggcatgtatcaaaaaaaaaaatagatgcatgttatcactcacaatgcatttcacaagagacacacctgtatcattatcttttctgtgcctgctgtgcataacaaaatgcttaaaatatcaaaggaaaaagtttcaacattctcacagacacatagagataactaaaaggcagaacttactgacatgcccaaccttcacatttctaaataaaatgtggtgttattacatgatgtgacactaaacagtaatgaaaaggaccatctttcagtggcagccatagcagtgaacatcagaaatataacattgaatgagttaagtcagattaaaaagaatacagtgaataactccttttatggaatgtgcaaaaacagagaaagtttttctataatgtaaggagtctgaagagagataaacagctgggaacacagtagaggctccagggaacactaagtttctgggtactgcttaggtggggtgttcttttgaaaatttaagaagcatcccttggggacctgtacatttccatatatacattctacttcaagagaaatttttaacatagaaaaagaaacagcccagagaaatgaagatgagtgagaatttcaatgactcaagatcagccataacgagaactgttaacgtggtgatggataaaagaggcttatttttattattttccttattattaaaaatgtttgaaaatttctgaaatataaataaaaacaagagttggtaagtaggaaagaagataatggcacatgcatgttgctattgcagggacatgtgattgcgagaatcacaagatgagctggggaattagttattggtgtaaacattttacgactattttatttcataagaccagtattaaaataaactgcacataaaagggatatttaaaatcctataaatttaatctcaaagataatgaaatcattgattgggtctatattccttaagggatttgggacaaaaggaaagaaactggagttaagaggattgacatgctataatttcatataagatttaatttaacattcatggaccaaaggaaaaaaaacaagggaaatcaataaggagcaataactcccctgccaagaagtactttggaaaggagaattttgaatttgagagaatttagaaggtttaatagtgtatgttgagtcaattttaatttttaaagtttattttaccaaatcctgttgaaagcatgcatgaaaaacatttttatgaatcgttattctcagaagacattgaagaatctgagccagacaatgttgactggcaaagcaggcacataactttctatggaacttaactgatgggagcaacctcctagattctcccaattcctcttcccaaacaaataagtggttcttgaaccatatggaaaatctgaatgtttgctttaaaagacacagatgctccaggcatgtcttgccttgaaggtagagaagccaaatatttgttacccttacaatccctaggactgtggtggtcttgtgactggttttcaccaatgagacaaagaaggaaaagtcaacaggtcacatctggacaagctttcatcattggtagaagagacagacatttcactctcctttgtcctgtcttgatggaatgtaaatccttcctccacatagtctccacttcagctgggcaaaacagaacctcctcttgttctctcagtgtgattaggccttcgtagcatctgacatgggtgttctggaaaggttgaagatgaatgtgtgtgttcagcttggcatgtttgacttgggccattaatgtagaattgttaagtaagttaaagcttgataatgacagacacacaggaagaaagagagggagcagtgttgttgcgtttaatagagcttcagctatatccattatgtttttaaattcagaggtaaaagaacgtgaagtaaatattaaattcaatggacctagaaactgggtataagatttatattacaccctacaattttaagtatgtcaaagtattgcaaaattataatgactatatttcaagggagccattttaaatgaataaataatgagaataagacctctggatttccaccccattaggggagcagatgagatgtaaggaaggggtcttggaagataggggcaacaaagccgggctagactgcaacatagatggttcattagcctaactaagggctggggtgatacactacccattgggtaacacattcacatgcatgtgcacacacatgtgcacacatatgtgcataaatacagttacattgaaatgaactttagaatatgcattgctctcacaaaatgctacagattgggtctttttaggaacaagttattttcttgttttcacgaaacgctgtttggtaacacctccagattttgctaggtatagatgcttaggctggacaaactctcagtaaatagtctagaactcagagagaccaaagcggaaaagcattatctctgaaaatcctatccctttttaggccagctttttcctggtaatgagtcacatttcagatctattatggcaatgatttatctcatattcataactacatatttctgcatggatgattgatttggaataggacacgctgcccattaacaataagggctaatgccaattattactttttacttagagatgctgtcatgaggtaatatgcagttacaaccaaattgtcctaaacctaaatttgatagggagaatatatgtgtggtagtatctgtatgtgtggtacaatatggaacatagtccttctcctccatagcatatgagcaaatgatctggtatcacaaatgattttctagttgtccaacagcaacagaaatacctaggggactgaatcccttccatttctaactttatagcttcctaatgaaatgtcaaatgtgttttatctaaatttgttgataattctcttgcaaatatgagtctaaattgtgccatttgtgtggtgggcatggtttaggatagtttaggatagttctggaatcagaactagcttccagccccagctatgcctctcagcagatatgcaacatgggtaaggtatttaacctctgagccgcaacatccttgtgtatcaaacggaagcctatgactatcctttatacaattgctttaagtgatctatatagaatacaattgatgctggttagttcttccttgcccatttccacacaaaccttatgaaaagtgactatcattgattaaaatgctgacaatccatgccccattagcatccaaagcagtaaggaacactccatcttctattattgttgttttaaacaattgatttatgttttcaagttgctcaaactaaaacaacacatcaattacagcagattgctacctctccttgtgaagcctccaggcaaacccagttgatgagccattttacttttgctttcccattgataatgagcctgataaaactgaagccaagcaaatatgaaagaatgaaaggttcttctgaggatgggtaggctgtggggcttctgcaagaagaatcacaaatagcatgcgctcactacacactaaaattaccctatgtttattttcaaaccatttcccactttcttttttaattatttttaattactcatatttacatatccatccccccattccctagctctcccatactcccatgttccccacccaatccactcccccacttctccccagagatagtgaggccctccaccaaggaccttcaaagtctgtcatatcatttgggggagggtctaggccctccttgctatatctgggctgcaatagtatccctccatagagaatgggctcccaaagtccatttctgctctagggataaacactggctccgctgttataggttccatagactgtcttggactcctagctggtacccacattctgagggcttggtttgctccaatgctgtttccccagatttatgactagggtctccatgctatcagtaggtcaggttcactgtttctgcaggtctctccatcctcgtcttggctcctttgcttaactctcctccctctccgcaactgaattccagtagtatggttcagtgcttagctctgggtgtttgtttctgctttgaacagcaattgaatgaggactctccttcctctccctgcccccaggctccaatttggtcaggggttcttgtctccatcccattcttcgagcgattatgcaatcttctcttggggtcctccttgtttcctagctcctctggcattgagtattgtaggctggtgatcctttgctctatgtctaaaaatcaataatgagtgagtacataccatgtttatctttttgtgattgggttacctcactgaggatggtttcttctagttccatccacttgcctgagtatttcaagattccattcttttttttttctgagtagtacctcattgtgtaaatataccacactttctctatgcattcttcagttgaggggcatctaggttgtttccagtttctggctattacaaataatgctgctatgaacatagctgaacatatgaccttattgtatgagtgtgcattccttgggtttatgcccaagagagggattgctggatcttgaggcagatcgattcccattttcctgagaaactgccatactgatttccaaagtggttgtgcaagtttgcactcccaccagcaatggaggagagttctttctgcacatcctctccagcatagattgtcattggtgttactgattttagccattctgacaggagtaagatggtatctcatagtggttttgagttgtatttccctgatggctaaggatgagaaagacactttctcaagtgtctttcagccattttggattcctctgttgagaattctctatttagctctgcactccatctttcaattgcattgtttggtgttttagtggctagcttcttgagttcattgtatattttggtgatcagccctctgtcagatgtggggttggtgaatatcttttcctcatttcccactttcttagggaagttgggtaatttcagatctatgtctatccaaattattgaccaagcaaaataaaaatgcagcggctactcagtttaattggcagtgttttaaagaaatgcatggtgggggatggagagatgtttcagcagttaagagcacctggtgctctaccagaggatcttccatgtggtttgattcccagcacccacatgacaggtcacaactgtctataattccagttccagagaggatcttagacatgcttgcagacaaaacatccacacatataaaggagataaaactaaatacatacaaaaaacatatacatagtgattctctaaaatcaacctgtcaaaagatttcaggcttgttgaataacattcaactgaagctagttaaaaatacatccctaaactctggtccatacctttttattccacagatcaatgagaagccctaggaatagtatatatatatatatatatctatctatctacctatagatatatagaactttccagttatactgattaaacaagttgtgatatatccatatgataataggcaatccatatgcaaaaagtaaggagaatcctctatgcatggataggagccaattttccagatgtttttattaagtgataaatagtgtttacatattttaccagtgctgttaagaaggatgcaaactcacttctccatgcatggaatctttccagaagatcactcaagcagctgataataatgggttggctatagagagaagaagtggatactgggaaatagacagaggacagaacttcccctgtgtaaacattgcttgcatcttttgaaattttagcttagaaaaagtactatgtgttccaaaatgactgaagaaaatagtatttccataattggcatgatgaaacatttttaaataataactacacggtgtgactctgatgaggattttaactgctggccaagaaatagaaaacatacaatgcattaatatagcatgtgaagaggtagcatgtaacaagcatatgccttatctctaagagattaacaaatgtttgttttataaagaggtggtaccatatgcttgatgcatttctgaaaacctcactgttctgacagagggtggtgtgtccatttgctaacaagtttaccatttcttaatgaaaatggcaaaggcagagttcacaatttattcagccagtcagccttgaattgtgtaattcttcattatgttttgtagctggagaggataaaaacaatttcaaaatatatagctaaagacttttaaaatgtttcataccacaccacttcaaattaaagttcaaaatcaaattaaatgcggccacattgctcttgaactacatttgattaacttcctcaaaaaataatcttcacagaaaatactctccgatgtttttcacctggctttatttagagttgatctaggaacacccacttgaagaatgcttctacatttttctataaactggttaaaaaaacattgtgattattgatttatacaagtggcttcaaggagccacttgtataaaacataatttcccattaaaattttgtaacagaaaatgtattatttttaatatatgcttcttgtcagatgagaaattttgccaagaactgcggggttgaaaatagttttcaaccatgtatacagacttttttttttttttttttttacaaattttggggctgctctagtcttgagaaaagaggaagacaaaatcacattttaaagatttaaattgcattttttgcacgaggcaccactagctcagtctttacttttgactgggacattttttttaattttcttttttcttttctttctttttttaatttttttatttttttgtagtactcaatatgtgtcccaggcctcctatctgccggacaggctatatagaaagatggtatagccccactcttcctttttatatagcactgagctatccaggcttgccttttattcactgtccagttgtgctgcctcaagtggctgggattataggcctgtaccattgtgcccagcctgactgattcttgagtgggctaagtcaatcaacacactccctaagtggatggatagaacagtaagaaaagttttgcaaggttttgtgtttggtgtcttcagactgacatgggtgacttactctgatttttttgggtaaagtattgagaaactaattgctttggatttctctagttttttgcttggttaggatcctgcatagaaccccataagagagagcgttattttgcttcttgaagaaaatgcagacttttggagaaagcctgctcggactgggtaggtatctactgtggtttatagtaaccatagcttacacttctgaggatacatctgcttcaaggcctgaaacacagctatcaccccacaggttggatcctggacatttatttcatttttgtccactgcttctaataactttaattagtccagagagtgaattaagaggaagaaatcaaatcctttctcattcttatattaattatattgaactctgagtttcttatctcctctttagttttagatttaagtttctatttttatagatatatcatgaacatttaaaactttttactaacaatattctacatggaaaagtgataacatatctaaatattcattattagtgatgctttagactataggaagataccacaatcctgataggaaagttcatcactcaatattttgctactttgtaattttttcaagttattgtttccaaatttctaagaacatctactcgcaagtagatgctttaagtactcgcaagcactcactgtataattttcttaatctagtatttctggtttcatgaaaaattccactgcagtgtcaatctcctgaccacagatgtttgtctcatgtagatgtgctagatggtttctgaactagtcgtctgtgagagacaggttctacagaggtatgtgtgttatatgtagtaattttcctggatgctgctctcaggacattataaaatttatattgcatttttaatacaaccacaatgcttttgttttggcaatagagttgctggatagtttagtgataaataaagagtggggaagtatcttcacagtaaaaagcctgtcagggacaaacactaaatgctgcaaagaaaatggttgaatctttctttattatttatttaaattagaaacaatcttattttacatatcaaccccagttccttcttcctcccatcctctaagacccccccactgatcccccatcccatcccccttctgctccccagagagggtgaggtcttctgtgggagatcaccaaagtctgtcacatcatttgggatagggcctaggccctcccctctgtttctagggtgagagagtaaccccgtggaataggctctcaaagtccattcgtacactagggataaatactgttccactaccagaggccctatagactgctcaggcctgctcactgacacccacgttcagggggtctgggtgagtcctatgctggtttcccagttgtcagtctggggaccatgagctcccccttgttcaggtcatctgtttctgtgggtttcctcaggttgagtcaaaagtaaaacctgagctgggtgtggtggcctatgtctgaaatcccagctctggggaggccaaagcaagaacatgactagttttaggattcagaggcaggtgaatacagacaaaccgggtagagggaggagtgcagttaccatgaagttgcagcaatactcagatagaagtggtcaggaaaatccttcaagagttgtcttttcttgaggcaaagtgcctatgcctctgcataggaactgaccctgtgaggtaattatgaacttgagctaggtagctcttttcagctgagagaaactccatggagagaatttgggatgagagttatcagtcagcaatgctctcagaacctgaggtattgaattcctcagtcccgaagacgaagagcagaataacataatattttatagaattcatctcttacgtcactgtaatttacttatatatttttataggtttttcactgtatcaattatcttctagatattcttgattgcattcattggtttttccaaaaaaagttacatcatggtgggataaagtgaactctcatttttttttatggtctgattcttagttctcatgactttctcatactgtagctgtggtacttattatgtcatcactaaaattattgatcatagaatgaataaattcggtaggtgtcaaacctactttgtcctgtaaaatggagtcccatccctatctaaggatcagagaccaacatctttctaggatgctggatcttccttatatacatttccctttgaattcttcttatcatggtcaccctaaagcagcaattatatttttgaagcttaatgagactattgttgtgtccaggtaaatattttaccttatggggaacagaatatctaaatctgagttgtctaaagatgtagaaatagggaacacaaagtctacaagtgagtttcttggagggatgctagacaggggtaacctgcttccttcctttaaatctcagtctcagatgctctattctctggggacagagcatcatgctgtatacccttgtccctgagcattgtatgcagactagtgactcactttcaaaaggctatttattctctcactccaggttgactgtagtgatgagaccaatgaacttcatgggaatttgttcactgtcaaatgttgtcaactgggtctcagtgcagtgcaatacctcatgtctgtgggtctaatattctacacagacttgcctaatggtgctgggcggggatgtaaatgataaaagcaaacccaaacccagaatctatggagggttttctgccaattgagattgctacaagatagaaatctgggttctgtggacacaagtaaccaccaagtatttggtctgtgctcttggaaattatgccacatccttgcttaacattggtctcggttgctggtgggtagtatttggggcaataggcatagctaaattagcctaagtgagtgagatccatgttgggcccatgaatatgctctattctagccactgtgtttacatactctgtttatatgaccattgtgccagcattgaaatggttaatacagaggctggtcaaatcattctggttttggttgcttggtgcctctgaagcgtgtattttagtgtaaattaatgcacaaagattttcctagttggttatgttcccataggccacccacaagcttcttcccaaaggccccttgttacctgttttcttgtatttgttttccctattccctcgacaataagctaaataattttcctctgttcatgaataagtatagcttgctactttggttgaccattcttcccactcgagttgtgagagccggtatgctgcctgaagcttggccactgtgaggactgttgctttcagagagacaccctgagtggagtcccagtgcccaattctaaccttgacctcagttttgaataactgtgagaaccatggctgtctttttgctctcttggtcagcaaatcatgtgagaaccttgaaattgatcaagtccttgctgagggagatgtgacagcgaactgcattgtaccctctcaccctatgtttgcctgatcccagatgtaacacttccttcttatgacgcatagattgtgagtccacctctcagtatggcatgcctgctcacagagggctgggctgacagctatcagctggcagtacttagcacctgaaggcattcttctcttcctccttgaaaggagagcatcaccaatgtgttgatgttaagaattggtctgctctttgggttttgtttggggtctgttttgatatttttaacaaggtaatttttaaaagtagcaattacaagaaggtttctgaggatacaaaatgagccaaagtaaaaaatgaaaatgtcctaagatgatctgaagtaaaaccaggagacctggattccagtccaagctttgctagtatctttgaattttatattgactaatcatttcatttttcagagatacttgtcatatctccactatgagacagttgaataagatcaatttttcccaatctggagtctactgagaaagtaataaaaattcaagagctatttccagtatcttataaagcctaatgaaataatttgcctatccttgataaggttgcaaagagagcaggtggaggacacagcactgacaatttagacaggtaagagagcaattttagataatactgcagtaaaaaatcctagaacatcattatgtcataggtacttccaaggtcacctggtcagactcacaaccagatgtgcaaatcccctcatgtcagtccacctaaattgaccttgtcccataatatcatcaatgcctgcatgtatgtctctggacttcctgtaaccactgtgtaccttgtcctcaaccttttagacaaattagccttctctcatcttagaatctttgaactagctgttcactttttcttgaggtgatattttcattttattctcagcattctgacttctcacccatttctcagttaagatagcagctcctcagagaggcacctcccttgatattaaatccacagtagccatctaatcttgtcttgcacctatggccttttttgattacttaacactaaacactttctgtaatttttcttattgttttaattttcttcccgctaatatgaaatgtgtagggatggtgttacactttcttattgctaatcttacaacagagcttagaaaagaagtagccaaataagatgtattcattcagaatctgctgaagaaatgaatgaaggagatcctgaggcctaatctcctaagacaatagccaaactattcaagacacagttcattatcattcaaatttgtatccccattttagctgttaaaatcttgtctaaagtccaattactcttttgtaaaactaaattaacttacgtggctataactattaattcccattctttgtcaactaagagcctcctgtttctaaaatgtgacatgtaagaggagagtatttataacaagacatacagtaggtaccaaatatcaattgtgtaaagttaacttcatagtagaagcattttcttctgtgcacacacactttcgtcctatagataacatgcagatacagtaacttcagggttacctgtgcccatggtaaagagagaggtagcttttacaatacttttggagagatgctcttcttatcttggaattttatgcaaagcccaagaggtttttgaagcctgctggatagcatatattcatttcttttttgattgcttatattcttggcaattcaatttcttcaaataaaatagctatcggtttgtgttgttttttctgggttatggagccttactagatgctaggagacaatgataaccacaagcaacttcagttctcaaggctgactttctcaatacttctttcccaactaaaccatcaccaaaagtagactcactaattcatttttattcaacaggaggaagttttttaaaaaatattttctgttatccataggcaaaattattaagctcttaatcattaagcgattttgtattagttaactcatttaattctaatgctgtgttattattttgatcagtttatagatggagaagctgttgtacagggaagtttaagtaacctatatacagctaaatggctggtacctactgagcttggcgtctgaacatggctggctaatcttctgctttcagctcatgtgctgcattctctttggtaagcactcagaattttctattgctctcataaacaattattgctgtagtcaatttcacaaattagtaaaccatgactaatatcttctccaaaaaaggaatatctctctcttccagagtttcagttattacattatcccaaattctttgatatcctggtcagaaacaagcctcagtccacactgggcctgactgcacactggaaggacagcgttctcttttcctggattaaaagttcctaccatagcatccagtcaccttagcctacttggttcctacattgtaatctttagttgtgattgtaggaatgtaattttcatataatttgtaacccatttgaactactgtagacattgtccaaagtgctggtgaagggttcctcatgtgtttatggcagaagtggcagaggataaaactgaagaagaaatgaaaaaaggcatgtaaggtatttcatataggactgaatattaaaaacaggtttgagagatactagatcttagcagtggttgctaaactcccctgaaatgagatggagcttaaacctcagcagcctgtgcaaggtcctggggagtaccactttgcctcctaagatcttgcatgctcccgtttgacacttttagagtaaccattcattttaatcatccattctgtaattttgtactgagtttaatatcagtacacacagcactcacatttttccttcatttaaattactcctgcttccattcatacaaggacatctgctcaactgtgttcataggagcattatttgtaatagacagaaactggaagcaacctagatgcccctcaactgaggaatggatggagaaaatgtggtacatttacacaatcgaggaaaaaaaaaaacaatggaatcttgaaattctcaggcaaatggatggaactagaagaaaccatcctgagtgagggaacccagtcgcaaaaagacaaaaatggtatgtactcactcatatatagattttagatctagagcaaagaagtaaaagcctacaatccacactgccagagaaactagtaaacaaggaggaccctaagagagacaaacatggtcccctagagaaggggaaagggacaggatctcctaagctaatgggaatcacaggggtggggttggagaaggagttagaagaaagaaaaggggataaggggagaggagaggaggatgaggagtgggcaggaagatctagtcagggaaggaatggaggagagcaagaaaagggataccatcatagagggagccattatagttttaaagagaaatctggcactagggaaatgtccagagatctacaaggtcaaccccaacaaacaatctaagcaatagtccagaggctaccttaaaagcccttctccaataatgagattgatgactaccttatatgccatcctagtgccttcatctagcagctaatggaagcagacacagacacagctaaacactgagctgaactctggaatccagttgcagagaggaaggtgatgagcaaaggggtcaagaccaggctggagaaacccacagaaacagctgacctgaacaaggggtttctcatggatcccagactggtagccgggaaaccagcataggactgttccagaccccctgaaggaggaagtcaatttggaggtctggacaatctatggggccactggtagtggaacagtatttacccctagtacacaaatgaactttgggagccctctcctcatagagggatactcttgcagcctagacacactggggagggtctagggcctgctccaaatgacatgacaaacttttaagatcccccatggaaggcctcaccctccctggggagcagatagggtttgggatagtggggtcagttaggggcaggggaggaggcgagggagagggaactgagactgacatataaaagaagcttgtttgtaatttaaattaaaacacacacattcacacacacacaaaattactcctgcttctttctccctctccatctcccctcctccaccccctctctgccccacccccaatcacccaacaccattttgcagagctaactccttccctggttcctccaccttgtgacgctgcccagctgggcactccatgttctctctccccacctatcactgacacccattccctcttaaacttgtttgttctgccctccccagcctgaggaccattgtctttgacgcagtagataggcagtggggcaacagagtcatcctgctttgttgttgtcatctgttatcgccatctgtctcaagcagagggcctcccccttcctgcttgctcttcttgctcgtgaatgtaacttttaaaatcattcttttccctcattattttatacaagccttggctccagaagtcatatgtcttagattattcttaaacactcattaaaatattttaaattcacccttggctgtctattcttcgttatgtttttgcattccttgaaaaaataatcatgcttttaaatatttgaaattgtctctttataaactatcacctaagacccagatttcagttcaagcacagtatgtgaccatggagaagttcagaggaggtctgttttaaagtttcctaccatcctgtctctttaagtacaataaggaagttggctgttacatttgttgtgtttgttttgtcttttcttgcccttaagttgaagctgtaccatcagctctcctttttttccccggatctgtagacttgaacttatgcacacaatccgtcctgagggttttctcaccctcattatcacgtggaccaatccttacaacaaacacgtcatatctaacatattccattatatttgatatgtatattttatgtttattttcctagcttcacaaaattaggttaattattaaatgggagataagcagatggtgtggatgtgctcccaaaccatgggaacaggtgtgattgactggattcagaacattccagaagcggcactgacaatacttcctggtggattggttatagattgtgaaagaagaatcaggggttctaaaacctaccatttcttttaagcagttaggccagatgataaacctgtttattgagaaatgaaagaatctagaatagccaattttaaaggggagttactaattctgactggccacatttgtgtgagatcaggtttactagatattcaaaatgaaatgggaggtattatatggaagtttggaggtgaaaagggagaactaaactgaccacataaatttgagttagctgccaaagctggcctgggaccagttgagatgatccacatgagatcatagtgcggtaagagagccaaagagagtgtcctccgtcatcaaagcagtgagaggtcaggggagaaggtaagggagtatgaggtgaaatatcctcaaaggctgtgaacatctgatcttcaggaaagcacatcaccagtagggtgtccggaaaggtcaaagggcacagggtatcaattgttaagagcttcggtgagatgatctcagagaagcagtcgttggctttatcaagatgaggtcattggtgaggtaaggccctctttatgagtgaggtcagaaggaattcctactagagtaattttgagatcatgatgggtgaacaagtagagaccagtacatacagtgtcccattatttctgcaaaggacagcggagaagtaaaaggtagctgaaatattaagtcatagggacactgttgtctgtcccctgggtctctgggttgtcttgatgggtaatctaaagcatgtttcagtttgaatggatccagcaaagtggaattaatgatgttacagaaaaagaaaacatgatggtaaaagttcctttaaatagaaaggaggaggtagttggagaggctaggctgaggtagggacaatgacccctctgttgcatgtaatcagaagggaaccaattaatgcatgcagacataaagagactgatgaggttttgattggttaatgaagttgtatttattagtgtagaaacagattagagaaaggcaaggaagaggatgctggcaatattaaataatcctgtttaggtttagcatggacatcttcatttccttttgtgggctgaggttccaatggcaatttagttttcacagctttcatgaaaatgtcattcacttgatttatctcatattagtgatggtattgcttatatagagagaaaccctgtccctagactgagaagtctaatccttctataaagagaagagcgactgtagcccacagaggaaaagcctcttgggctggacaactaattttggctgaattttctttcctggaaccatatggtcacctggttagttacatatcatgaaccacaaataaggtgatatttgcagagcagctggctttgacttgatcaagtcagaaggctagaattatccttagctttccccactgttgagcagaagtgaactgagaatctataaagcataaatttccgtgtcaacacttctgggacactgaaaacaaaatacattcacatagtcattgttttgtatgtgttaaactcttccacaatagcatgtttgaattgtaattagtttagattataccccctttttttgctcggacttttcatctatcccattttccttgggacattgtaccaggcacctttgaggtccaactaaggggaagcagtgttggagataattttaccttgggtccagtaggatgattttatgctgtccacaatcacccctgtaggcagttaagttatggctcatccttcttgcaggggcagcttctgggaagttctattgtggcacaaaggttcaggacctcccctggccatctttcgaaatgagcacaaccagtctcacttagtattgtctagaaaggacaaatgcttgctgtcgagcattccggaagtgaacccaaaaatgaatcttccagtctttagattgataatgtttagcacttatttagctgagtgttatagctaaatttagctaatactggaacagtgaaggcatagatttctctttccatatatttaatactgatatacagtggtggacacatcatacttttttgatgaaaattataccccagagaatttatcaaaactgctataacaaaagctgacagctacacccccagagagcaagagttcctgtatgtgatgtcacaaatcttatatatgccaaatctcagtggtaaaatcacaagtgttcataaccaggccagcatgaatcctgagtcattactccagtcttcatttagtgaagaaacttgcaagatcattgtcatataaacggcaaaattagttttactgccaaaacatttaaagcagttgattgattaaaaatagtgtgacttttttttgaggatttggtaatgtttatagtatctggcagctttgagaaaattgtaatttattgtggtttcttttctcattcaaaagaaaaacttttatctaatttggtatgagtaattttgagtttctttctttaaaatgatcacacaaaacctggatccaggcctactccctaccctcttttacatacacatctgatctatgtaaagactctgtactttcaacctgaaaatatatgttaaatgtttcttcttcccatctttccgtcatcactgtcatagtaactgattttgcctatctgtcatgaaaaaaataattaatttcatatagccaagtttgttgatttttctacatgttttcaagactactgcattactttgaaaattttgagattttttaaaggcttttcattttcttctgatatttttagtcttataagtttgctaactttatctttagagtcagaataataagtatttgcgttcctttaggtaactaaccagtaatattactatcatgtaagagaattttttctatcaaatcaaaatatcaacattattatttcatttcatttataatcagctatgttttattattaatttattaaatactattttaatgagagtagactaataatacttttaatgtctgaaaaagcccatccttgataatatttttaggtagaaattaatttcatattcttttcctataaatattttaaaattatttgatcagtttgggagaaaaaagaaacctctgttggatttctgattagaagtgcaatgaatttatgtattagtataagaaacatatttctccatgtcccaggtcttgttttatgcctttcattaaaatgctattattttgttcatttagatctaattcctgtctttttctttcgagccaaatttgaaataagctttattaaatactggccatgtccaaagatattagctaggttcatacctaggattccaagtatggcctaattcctgtcttagttttatttccagcaattttttctttttattatacttttgatgggatattttcccattccaatttcaatttcataatatcaataggaaaaaagtctattaacttcatatctcctttgtcttatgaacaaattctcttattaagtaaaaaagattttgagtagttaaacttttatattctaaccatattattatacaaactgcaagtcaagacaggattgtctctcatgttttcatatttaaactgtttcttttatgtttttagtcttataatcttcacagtgtttctaagaattagtgatactatcaggaaatcctgccttattactgatgtaataaaaaaatagttgccaaacatattgtaattactaggtttaagcaaggaaaaccttttgaaatcatacttagatggtactgggtaatgaattatgttttcctgaatttcatattttagctctctaacctccatatttctgtattagagatagggtttttaagagtatgattgaggttaaacacattcagagactatatcagttagtgtccagtgggacttcacaccaaactcttcctttcctccatgacatagccagagggtggccatgtggatgtcagggagaggaccctcaccagagtctaacaatgctgctaccatgatttcagctttccagctttcagaaaatgacaggctgaatttgatatttaagccacccagtctacagtagaactgactaatgtggtcaccctcccacagctgagggtttgttggtaaactcagccctacacaaccataaatgatggcacagtcatgacattgctatctatcctattggttctcaaccctgtttagcaatggctgatgacatgttcgcttgtcataggtaggacaaatggaagtagggaaggaggaaaggtatgtctaccggcatttaacagtaaaagctggttgtactgttgaatgtcccatgatggagagacagctcttcatgataaatatgtgacccccattgttagtagtgctgaagtggagaaggttgacttcaccaaaccctgaaaactctctaccaatgggagcactattgttagggtgcgaaatatgcatcaaaggctcatgtgttgaagacttgatccacaatgcaacattattacaaggcagggcttaggagaattgtattgtgggtactctgacctcatcaatggattcatccagtgatagactcataatctgatgggctactgggaagtgatggacacttgcaaggcaggttctagttgaggagatgagtcctcaggagcatacctttggggggtacatctaaccctgtcttcttcctgtctttttgctccatgctcaccacaacctgagcaattttcctatgctgtcctccctaccatgtctgtcgcatcacagccactgaagcagtggtgccacgtgatcatagattaaaacctctgaaacaaaaaataaactttttcctttaagtggattatctcaggtgtttgtttttttccccacagaaagctgccagacacaggaaggatgaggggagagggagctctgggcctaactgcagaaagtctagcccctgtctgaggaggtgggctgagaagagcaaagagatggctcttgttgctctgcaactgaaagtggcaccagcagcactactagatttggagtggggtcagtagtagggcttagcactgaagcacatgcagcttagtagaagctatccaggctagtcagcctcacagctgggaccacaggtagaacggactggacacataaagaaccatttttttcatagctgggagtagacttccccataccacctccttttctgactcctaaaacactggtgagttttattccaagttttcctgtatttgcttaggaatagctgatggattttatcaaatgactcaaggatgatcattcactgacctagtcagtatcatttacttactctaatggttatgttttgaattatcttgataaatgctttcctttcaaagagaaagtctctctctctctctctctctctctctctctctctctctctctctgtgtgtgtgtgtgtgtgcatgtgtgttgtatatttttgtgtgtatgtgcatttgtgtgttgtgtatgcatgtgtgtttgtatatatatgtatatgtatgtgtgtttgtgtgtgtgcatgtgcatttgtgtgtgtatgtgtattgcctctctctctctctctctctctctctctctctctgtgtgtgtgtgtgtgtgtgtgtgtgtgtgtgtgtgtgtgtgtgtgtgtactgcatgttgtaactgagccttaagcaaatgtagtgtaactaccacagagttatactcccagccccaggtgttttggtttgctatcttttgtactgttttatgaggccattctaacctcacttggaaggtctttatgcttttcttctagactagaatttatggaccgaagtaaaatatatcctcattggggatgagaaaaaattcatctctaacactattcttgtaaatgactgatctttaaccattgtgatttgatccatacttagtttgtagagtcagtttgggtcattttttgttttataatagcttttggattggttttgcctcctcctgtgtataatctagtggctaagctgttcaaatatgaagttaaattaggccactagttctcttaaacctaatgaataacataaaatgcaacctctttaactgtgtttaaaaggagcctaacaatctgtattgctcactacagctcattgtttccttcaactctcatcttagacatgtagagagcctgcccatgactcagatgcaggtgacattccctgtgctatcccttcaggcctttcatgcttcaaaactcaggttccaaaacttgaacttaggaatcacgctgactatcttatccaaatagatttctctcagcttgatacctctgctatccatcatagcagagatgtctcttttagctgtcacagaggcttcaagtagtagccagaagccatgctaacgtgtttttctgtcaaggtaaaagtcagtttgatcattcaggaaaattatgtggtgatatattgtttatgacccaataaagcttgtttggagatcagaatgcaaagctaaccacagccatagaagctgggcagtggtggcacacacctttaatcccaggactcaggagactgaggcagatggatctctgtgagttcaaggccaccgagggatacatgagagtaaataagtctaaaagaaaaacagagatcatgcctttaatcctagcactagagaggaatataagataggagcagggcattcagtatgcagtcttaggcaataggtctctagccacattgaggtcaggattgcctcagatctggtagaggtaagagttctctggtagcttggcttctttgtttctccaatcttcagcctgaaccccaatttgtgtctctgggtttattcgtgctacagaattatctactctttctatccttgtcacaagcacatggctttagagcccaaagaatagaatataatatgaaattattttcctaaagataatgtatttatgccactgtgcactgtgaacttcttacttcctttatactctctaaaaaccattgtttatataattatatacaaatttaaagaattttagaattatagccatataaagattagtatgcatacaaggatgctaatgttgaaagagaaagaaaagagaatatatatatatatatatatatatatatatatatatattcaaggtatcaactacttaaaaaaaatgtttagtctctccaaatggcttgctgagaaatactatttggcaggataattctcaatctggcttatgttgcctgtcataattttacgaagcccagcattttaacatttttgaacattttcccaaagatatttaacgatagcttcatctttaaaaaaaaaaaaaacagtcgatagaatacatataaaaggaccagtacaagaatgataaaacaattaaatcatgatggagaaaattcagtgcaagcacagtgaagtaatgaatccatttgccattactaagggataagtcttttgaaaaaaatcccttaacggggtatacatgggagttatcaaatgtagtgaatgtatgcctcttcccactagttgcagaactttaaaatagaagtcaccctggacatcaaattgtcaaacacaaatgtcaagtcccaaatacgtaagtgatagggcagacggtacaggggctgtttctgggggtgcactatcgtggagatagcatttgttaacacccctaccaatgaaacattaacactttgaggtttcctgggggtgaatgatgaagatactgatgctggagaaggcaacacttttgctttgaaatgatgatatctgcttctcagtgatcatcaaaggaggaagagctagctacaacagatgctgccctactaactcacaatcatgctggggagctgtcaagttgttcctccaaaaatatcaagtaagatgagataaaagcaaatgtttttgctatcaagacagagacatttggtcggagcaataaaataggctcaaatgccagaaaaaaataataaagaaaatgtggaatgagtaacttccaaagttatggaaataatttgactatgtcttactacatgataaaaattgacaggattcctaagcacgtacagatggaagcgcaatgctaacagaacagaacggaacagctcgcagaacagaggcatggttagaggcccagaatagcctggctggaaccaggaattctgtctgtttcaaaacaattatattgtatataaaatgtggatacttgtggctagttttcccaagtggtgactagttgtccttaagcaacacagattcccttatagtaaatgttacatatttgaatgatggctgaattagtctttgggtataatctgtgaaaataacatcctatcccttcattgttaatggacctctggataaaagaataaatcctatgtggtaattaaagttaacagaatatataaaaagggcattcacagttgtctcctgttgcacaaacgaatcctatttttttggttaaaaatctgattactaaaattgcaaaaatatgactataaacccacaaaatgtgtatcatagatttcttaatgtgaaatgtaatcacatagggaagagtgtgattatgaaatggactaggtagaatggaggaagctaggaaggaaaagaaaaagtagggttctaaattaacagtgtggtgaaatggcctgggaattagtctggccagcctgggataaatcatgtttccttaactgggagctgtgtgaaaatgcataagcttctcaatggaacattcagtcttgttgtgaaattaggctaatggagcagtggaggacatggagaaaggtgaatgacaggcagaccacagctgatggggtgtggcaggtcagtaagcattcagggcatcacagagggtggtggttaagtcatttcataacagctattgttttattgtacgtgtatgtttttggttttttctttttttactgtgtgtgtgtgtgtgtgtgtgtgtgtgtgtgtgtgtgtgtgtatctggtgttcacagaggctgggggtgggcttcagattccctggaactggagttagagatggttgtcagttaccatgtgggtcaaatcaaacccagatcctctgcaagatctacaagttctcttaaccatggagccaaccggccagtcccaccagctgcttgccatgtgctatctcacatcttctcacacgtgtgactcctcaactttctataaactccagtattgctaatgccagcctaccatcctcagactccaagagatggctggtaccttgcaacattagaagacctccagatcaggctgctgaaggggctcagcaggctctggtgctttgcagtgacacctgccaacctgaggcagatccctggcatttactgggtggaagagaatcaattgctgagtcctacaagttctcctcttctcactacacatgcctgtatgcacgcacacacttatacatgcatgcacaccttaaataagaaaataaataaaatctaaaacattttaaaaactcttcatgcaactctaacatgcagcagaatttcggaaccacagtctgtggcaatcacacaagctaagaatcagcatatccgtttttaagttcaggatattgaactaaaagtttggtttactcaagatcacttggctaatgactgacttggatgaaatggtgttgaggtagtctctcatgaaaattatagaactgagttacaaagtagcatgtagatttaatgctagcttttatttcaaatttagtcatatgtttaaagaccataaatatatttatgaaatatatttgtcagaataattttaagatagtattaaaagtaaggtttattttatgagttttttgttagtgtgatgacatttctaaatgtttctgtgtgtggatatattacatttttaataaggggggaaagcataaatgctatttcttttaaaattagaaatcttgggaataaacgtgtataaagtcaagaatgaacacttttaattagagtgcctaaagagcacccatatggcactctggacaatgtggaggacgtatgattctgcgtcctgggaattaggcatctaatcgtcatgaaacacctattagtttgagaattactaaaggctttacaacaattatgaggtagtaaaaactgctaagtctttcttattctctgatgtctcaaatcagatacttttgatttactttgtcaccatcttatgccaccatcttggtcttgagtatgtcataacttgaacattttcaaagcttttaattaagctcttatatctgtctatgcttagtatggtgttgcctgtgtatgtctgcaatagttgataaggctctactaaacttaaaaacaacaatggctacgctattgttgaggaaatggctcagtgggtaaagggcctactggataagcatagtgacctgagtttgcacatccaacacctacttaaaagccaagcatggtggcccatgcctaggatccaaatgttaaggaggcagagaaaagaggattccctgggcttactggacagccattctagccaaattggcaagctctggccaggctcagtaggagattcagttccaaataataaggtgaggagagattgaggacagcaactaatattaatctccagcctctacaagctcatgcatgcaggcacatgtgcccgcgtgcacgcgcgcgcgcgcgcgcgcgcgcacacacacacacacacacacacagagagagagagagagagagagagagagagagagagaaacagacacacacatacattcataaaaagggagagacagaaagatacacaaacacacagagagatagacggagacagtgataaaaagagagaaacacacatagaaagagatacagagagagagacaggaaaaaagagagacacatatacatacagagaaagggagagacagagaaaaacacatataaacacacagggatagagagagagagagagagagagagagagagagagagagagagagagagagagattcctattgaaagttcagatttcttaggtgagtgctccagactttgcacaagttgacctcttcttattcttatttgtctagcttttacacctgtccctatttaccaaacatgattattctcaaatgcaccatttgtttatccatgtcaagccctttacctaggtctcttcctctgcttcaaatgtcccctgtatcattacttctcagctcaaatgcttcacaaaagatcactagaagtggtaaagtccatgcaaattcctcatttgagtttatttgagtaaattcaggtattattcttacctggaaggtgacttaccattcactaaacaatggacacacctgtcatgcttacacacgcacgcacgcacgcacgcacgcacgcacgcacgcacgcacgtgaacatgctcacaaatacatgtacccataaataattcgttttttaaattaagattacttatggtccaggataatacaatcatcaaatgacactgaacaaatatgaatctattactttcaaataaaggtatacaaatttcgagatcttttctagtaacattacaataaactacatactttcattttaaccattttaagtgtacagttccatgtcattaaatatattctcaaggttttgcagccatcggcatcacctatttccagagcttttttcattttttgcaaagctgaaccttggtacccattacctggtaacgcctcaactcctcctttatctgatcctgtgataatcactatctgtgatttctaaatctgactcatctaggaacttcacccaagtgcaatcatgcagcatttctccttttgtagatggctttgcagttcactagcttagtgatattgctctttcacgctgaaagatttccttcccaataacaaataatattctgtcatatgtatgtacctcattctgtttatccacaatctgttagtgatcacttgagttggctgcagattttgcccattgttgataaggctattaataagcataggtgtatggatatccagtcaatacatacatgtatgatctctggcttaggttcctttgggtatgtacatagcagtggaattactggatcataaaataattctattttaaagttttttagggactgtcatactgtctgcataatggccacagcactgtatgacaccagttgtgtctatgcattctcctttcttctctgactctctctcttgggtttagcaatagctaatccaatgggtctgaagtagatttcatgcctgttttggattttaaacaggagttacaaagtcaatcgtatgggctgaggagctgactcaaaccagtgatgtggaccttaatgtgatgatttgtagcaaagtgtacattgcattggggactaggagataataggaagtggctatttgaaaccttaagccttcagtaatagggtagtttctgctcagttccatccagtcagagttctgaaggatcttaatgcattactggaatacttgtgtgttttgagcattgagtaatgaattcaaactcagaacccactacaaatcaacatttcttaggcaactagattttgtttaaaaggagtccaatataggtcctcgagtatgaatggagcctttctcacattgaggctaagaattgggagtgtccaggagatactgatagagcctgtggtagccaagggtgaagactctggtactttgggttcctttgtagcagaatgtagagggcttgtgctgaggactgcccactctctgtgctttcattgtgattctatgctttatattatgctactggtcagtgcttttcccattctactgaaggttctcctgcatccccgggagacaaccagacagcttgaagttctttcccctcatagggaagcatatgtgacccttagcaacaaaccatgaaggaagttgtgccatatgtgtgtccattgaagaccatgagaaagtgcctagcgtttgctcctagcaacacagtatcctattagcattagctagaactatctggagcaaggatgggcaaacttaatttttcttgtgaaatgccgaatggcaaatattttaggcttgttctctctgttatatattctttgtacattctttatccactactataaaaacacttgctttttcattttcttagctcatgagccatgtaaatataggcccatagctaactcatgggctgtagtttgccaacctgatgttttgaaccatctctgtcactacattgtgttaccctgtctttccagcagagcaatatgaactttccagaaatgaagattctttgtgcccaccacatgtttgagaatattgtcttaaacactatgggcaagtaggctcaactagcaaccgagttttctttcttaggtttttgtttgtttgtttgtttttgtttttgttttgttttggttttggtttttcaagacagggtttctctgtggctttggaggctgtcttagaactagcttttgtcgaccaggctggtcccaaactcacagagatccacctgcctctgcctcccaagttctgggattaaaggtgtgcaccaccccctggcgcaagggggttttcaaatacactgagatggtgatgccctgagtcagatatagagttaacctttttagttttctccacatatagcgtgtctgtaactcatcagaaagatagagcagactcactgtggcatagcagaatgggagaatacctgatgctctaggcatgaggcaaaagggaagggtgcatgtttcctattttatctgtgtaaaggggcagtgtggttctgtaaagagtaagtgaccaggcctggagacgtggcttggcagttaatggcacttagtgccctttcaaagaacccaggttgggttcctggtgtccacacgctggctcacactgatcctttactcctgttccaggaaatctggtggcctcttctggactcctagggccctagacacacaggtggtgcacagacagacatacaaggcaggcaaaacacgcttacatatcatgtaaaattaaacagatctaaaataaaacgagtgacagggaatccccatagcatctgtattcccagaaggaacaaatatgatatgcactgtaaccttatagtaacaccagtttgaagttttgctattgtcattttgtttaaaaaacaaaatctccaattgagggcaacaccatcggatacacttgacttatctaagagtaaatacagtatgttcccagtgagcacagttttgtccttatgtctttgtgaaatggccactttcgagtttccttagttttccaacataagatgtacaactccagtaaaggtttgagggcaaaagtgtgactctaagtttctgtactatgtccacttactaaacttgatttgtttggttttatgcttacaatgccttgtactatccccctgacctcttcatggtgaggggaattatctaggtctccaggataccagttatttacactgttccaatcatggttaacaatgtgttggtagagcagacagatccgagtataatgtgaagggcccccatagagtatctaaacttaagatttcattattagcaaacttaaacatttcattattagcatgcaggagtgaaacgcaagagtgaagaaatgactcctttgagttaaagcacaaaagctcggggggggggagttgctggggagatggctcagtgactaagagcattggctattcttccagaggacctaggttcaattcccagtacccacgtggcagctcacaattatctgtaactcagttccagtgaatatggtaccctcatatagacaatatagccacacatgtaaaaataaatctttgctgggtggtggtggtgtatgactttaatcccagcactcaggaggcagaggcagggggatctccaggccagcctaatctgtagaacaagttccagaatagccagtgctacacagagaaaatctgtttggggggggggcggtgggggggcacagaagctaccagacactgttcaaaacagaacaccttggaagaagggatgacatactaattatcagatcaagaactctcaagacttccatggaatgacatagtaattatcagagatcaggaactcacaagacttccgtttttcagtccagcaaccctccaccgttctgcagtgtttgcaaagcacaagatgagcaagttgaagagcttaagtgacgcagccttgtagggaaagtaagcccggagaccatcaacactgggactctgggaagccaagtgaggcacgagtaaggaagactagaaggcatgtgctaagagaaaaaaaagagcttaaaaatttcacatgtgtcttttatagagctggcagactccttaggtacataattcactgaaaagactagaaacttcagacatgaaaacaaagtggttccctgagacatccttaagaggatctactgcaggtattggggggggggtgctgtgatattgtgaacatataccatgtgctttcatattaccacatttaatttttcaaagattacttccttatagattagaaattctacccactttcccattgaaccttaatacccagtcttgtcagtagataagtgatagataaataaatttctatcctcatggaaaccaggcccaaatcctgaaagacacagcaggtaacatttcagacaacctcattccttatggtagcatgcttaatatttcccaagcaaacatcttcctttcaaagtggtataatagtaataatgagatatttaatattaaaggtaagcatgcaggggctggagagatggttcagctgttaagaacactgtctgctcttccaggggacccaagttcaattcccagcaaactcatggcagctcataactgtctcttaacaccagctccagggacttcaacacagatatacagatataaatacacacacacacacacacacacacacacacacacacacacacacacatatatatatatatatgcaaaaccaatgcacatttaagaaagaaatgaaaagagaaagaaaagaaggaagaaagaaaggaatgaagaaaagaaagaatgaatacaagagttgatctttggatttagaagagactgagtgggcatccagattttcttgcatgctgattatattgtctgccctttggcaacttactcaacagatcctggtcttgatgtcttcatctgcacagcaggaacaggcatagtaaagatgcagtttctgaagctaggcagtggtggcccatgcctttaattctagcactctggagaaagaggcagacagatatctgtattcaaggccagccttgtctacagagagagtcccaggacagccagggctacatagagaaaccttgcctcaaaaaacaatgacaacaagatgcagtttcttgggctgaagagatggctcagcagttttgagcacttgtttctcatgcagaggacctgtgttcatttcctagcacccatgtcaagtggctcccaactgcctataatagcagaaccagaagatctaccaacctctgtaggtacacatatccacaatatatatatatatatatatatatatatatatatatatatatatgtatgtatgtatatatgtgtgtgtgtgtacagatagatggatagatagatagatagatagatagatagatagatagatagatattctctttttgtactccatgtcattaatgccctcctggttgtcttagcacattgtcactacacctccagatattgcatcaatgtctggtgcaagagcagagaggaagaagtaaaaggggctcactgaaagaaatcacaacatcctatgaagcctttaagttatgccttgtccacaattgtgacacttgatgacccttagtatcggtgagtcaggagaagtatatttagaaatgtggctgctactctagcaaaattggaatcttgctattaggaaagaagagagaatgatattagatgggcaaccagtgttgcctacctcaaacatcattaaaggtcattagctagaccatagagggctatccactagcatctgctagcgtcctccacccaatacagtaaggacagttgtttagttgatttggggctcagattcatagaacagatggagtgaacattgatagaaggagagattgggacaaacttgattataaagagggatgtgtgcaacagagaggaagagaaaggggatgagaaattgaggggtgagacagagagaatggtgggggttgaaaatgtagtagaatctgaacaagcaaattgagacggataggtataaattcacaatgggcatcagagtttgagtattatataagaagactgcgaaaaccactgtagactgtgaacagaagagcgaaatgtttctataacaagaaaattcatatttgttgtcacactgagactcttaatctctttccaagctgagtcaatacagttatcaacacttttctgctcaccacctccagagcagcatgccagcgaatatgaatagatcactggagcatgattcaccattaattaacagtattattctttttagtgatttataaaagacaaaggaacaattaccgtttaactagaaatctgtgtagatatgagtgtctcttgttttctcagttggtttggctgctggtgtcttctgaaaaggcagaggggcatgacttaaaccctaaaacaatcagctaactccatttgggattgtgtctattagaaaataagcctgtcaccttgtgtatcacagtgtcaggtctttactttgcactagtcaacttgtgcatatggtacaagccacagtctctcagatagcatgaacgagaatttccattagtttctgaaatatttttagctcatgtttagtgcgataggagcattattccttcaaatctaaagattatctggaaagtcatgaactggttctttctaattcttcagcaaaaaaaaaattagttttgcaagatgttgctctgttctgatatttcaggaggcaacttcttcatgactctgcctgcatcttgcttgctttctccttccataaacttgtagttttggtgctactccatttcctgatcactccctttgacacttaacttaaagacacatattcttcctatgattcatttgcttggctttgctttttgctgaggaatcacaactatcattcatttttgaaaatctcttctcccctggctttctttattcatccatattaattttgtatgtgaaggttacattttgttcacacatttttttcatatttattgccaactaactttcacataatttactgaaaaagagttcattaatttctcacatttatttgtctaccttgttgatctcaaactgaagtttaaaaaaatgattaggaactggaaatatggttcagtggtttagaatacctcttgtttttgcaaaggaactgggtttgattctcagcacctttatgatagctcacaaccatctgtaacttcaattccaggggatctaatgctctcttctgatttcaatggtaccacacacacatggtacacatacatacatgcaagcaatgcatttactcacacatatgggtaaatgggtgagtacatgtgtacacacgcatgccatggcatgcatgtagagattagaagacaactggaaagagtcagttctctacttctaccatttgcaactgtgggatggaactcaggtagtcagcctttgtaagaagtgtctgcactcacagccatctggacaaccaacactgagtattttgatgatagatggtcatactgaaagcagaatgactaactcacacgaacttgtagtatatcacagttgaaaagacgagctatgtggaatataagtagtttagtcctttaggagtttaaaagggcatatgaattctcatttctttaatgataaaacagcatgaagttataccctcataacatggtctttcttaattagataccagaaatcacaatgcatggatatcatctatataagtatgtaccattgagccatttgagtaagattacaaatattatttcaatatgaaagttacctaatcaagaaaacacatttatttcactgtaataattgttgtgagttccataagggtttggtcatccactgaatatgctgtgttgcagaatatgtcaccgctaatgttgtagaagccatcttagtaagtatactctagcatgtttacacagtgaagaaaccacaaaatgatacacttctcagaataagatccctagtgatacttcaataacagatatttacattttaaggtatgtataaagtcatatctggcaacatcttaataaaaacatcccattttccttcacagaaataaaagatataggaaacaagaaattctaatatgacaaataggggcagaagagattgctcagtgggtaagagcacttgctgctcttcagaggacacatgttcagatcccagcacctacacgacacatcactattacctataacttaaattctaggggatctgataccttcttctcacccccaagggcattgcatgtatgtggcacacataaatacacacacatatacacacaagataaatacatttttcttttggtgttttgagacagggcttccctgcgtaacagctctggctgtcctgcaactctcccactgtagccaccccacccagtataaatcttttttaataataaaaattgattaaagaaagatcagattttccagggttgaaactcagaaggaaatttttgggagaaaaatggattatgtagttctctttttcttcctcaagattcatgggtctactgatgtctatctccagcttaccacaaacctgctatgctctcagcatactcaaagctgtgatctatttggtattaggaagcagagaaagaccgaaacacttagatgttttttatcaaagagtagaaaaacgaaggagactcagatgatctgactcaaaaaatgttgctgctccactagggtggaagggacagtctaattttatggaagcctatataagcaggggaaaactaactactatatcaggaaaacaaaaatctcagacataatagatgaggattccttgcaatctcctggttcttacctggtccctccgccatacgttctaagacatcagcattgaaatacagcatgacagatgagccaggaatccctgtgcatcaaaggctggagtactatgatggaccatgttacaattgttgtgacagaagtgctgcagacacaggcagacatggaagataaatgagatctgtgatttcaggcaggatcccctgtaccccacattggggtgcctggtgcttcattctccttaccctttaaaacttggcaagttgtcctcatgaaatcagtcatctttactgaggaacttcttgttttctcatttattattttttgagacagggtcttactctgttacccatatgggcctggtactcattgcaattccactgtctcagctttcaagaaagctcatattgcaggtgttctccactgaatatcttctgtctttcaatttcttctactaatggaggtgatataactagctttcagtaaggtcaagccattttcttgttgtctactgaaatttatttacatcaccattcttgtttcaccatgctgttgaaacttggctgatggtgatctggaagcaagggagatagaagttcctcatactcttctaattgtcttgtaggcagcttgtaaagcaggttgcactgcccaagagatatgggtgggaagttaggcagagcctggtagaccttctgctggtcttcttgatgcagactttctaggttcattcatcactggcttgcagcatttggcagagccagatttcttgggcctaattgaaatgggtgagcatacgtctctaaagtacactttagatttttctcctcctacttttatttcccttcaaagatgggggatatttgttgatgggtgaaacaaaccttgatctacttatttcatataatgggttggaataaaaatctttgctccagtcatatctgttctgcatctaatatagtcatccacctgtaaaaccaaaaggttgcatcgttctctaaggtcccaccaaaataaccaaacaaagagaatgaagataagagatgaaacttcaaaggcaaaagagaaaaacatcaagaatggataactgaagaacattttcctgatatatgccgtgtgtagcatgagtaactatcttgaagctatgacatgatgattatgagaagcaaatagctactacatagagcataagacatagaaaatatttttatttatatgtactcatctctgggaaaggatgtcatgattcttgttcattgaccccacattttataaaaagaaacatcttggaaggaccgaaaattaactgacgtaacaagccacatgtaactggcatgaatttctttaatgcagtactcagtgttctaaatagcactctccaagcaacttgatggataataataggaaatttgtaacctagacatgtattggaattctccttttgtagtcagcatttgagccttaattgttaggcacttctcaaccactatgaaatggatgagcagatagtagtgtgggataggggtgtgatgatataagtgcacatgtgcagagaaaggcatctcaaacgagcctggggaattggtggaggccaatggtagcaacaagctcaatcttgaatctgactctttgggctttattctttcctctgtaattgttatttgatcttgtgcaaattgagtcatctctctaggcatcaatttcataatctgaaacatgaggaaaatagaggcacctttcctaacaaggtttaagtgagattatgcatttggcataatgcctggagactgtaaatgctcaatttgcattggctgccactcttgccgaagggaggatacgtgaactcaatttgtggaatggatagagttagagattaagggagtagaagaggacattcaggggatgcaatgacctgtgacaggcagagagacatggtctctgagtcacagcaagtggtttagatctgctctaatattatttactttgattaaaccaagtatgccttcccagtttgcatatgaatagcatagaaaagtttataatctgcctcaggaactctttcaactgtgactcccctgtttcattcatctagttctttaattgagattggctctcgatctggtttctgcccttagtctattctcagaccacccaccccacctttaaaaaacaagacaaaaccagaaaacaaaacacttgaagatctgactgggtacttccaaaggatgcaaagcctgtccactagagttctgaattaaaccatggttgagacatgttctacattggcaccccagtcctcctcctgagtactcccttgctgtgcctgcaatgatcctgtgtcaccacacatggagcatgacaggatcatcttctatagggccatccagagctaaataaaaatgagttttgtgtgctcagtttaggaattaaatattttccctaaaaagatatgatgaagatgttctaggagattaaataaatacatacacatgaccagactttcattttcagatgccatctcctgtaaagtttccagatctgaggcaggtcgaagcactgggaggactctgagatgatcccagggatccaggaactcctcccatagtggcggtggagaagcacaactgtgagtatgaaaggcatcactgacacaagatggtcagcattctgtgctaactagttagtgtagcagagtaagaggtagcagtgagtgccagggtggaccggattcctagttcagcagctgaaggaaggatgatgccaccactaaaaaaaaggaaaacattaccaaaaattaaaatttagtataaaggtaataaagactagttaggggtattttacgttgaagttggttcatgggacatttaaatggagacagatgtcatcagaggggtctggagtttgagatgtagataaatgtttagattttttttttaacaaacagaagaacacagatgtgctttacaaagaggatgattcttgtgtttggaatacaaactttctctctccatgtattatcattgttgctgttgctgttatcatcaacggtaattctagctgggcatggtggacatacctttatttccaggacttggcaggaggatctctgtgagttgaagaccagccagggaaatatagggaaactctgacttaaaaacaaagaacaaaaacgttggtacttcggttttagaaatcactgtgtgccagttttgagggtactagggtgacaggggatatgataaggtgacaggcatgcacgactaggctgccttctaactgaaattttctaggaggggcagctatcacacatttaccttttactgcttctatagacatagccaaactttttttttttcaaaaatctgggctattacagttgaagtcaatttgtacgtttattgtgacagaaggagatctctagtctgtcaactttgtgatctatttcatttagttttcatttattttatgtatatgggtattctctttgcttgtgtgtctgtctaccaaatgggtgccagtgttcttggatcccctgggactggagttaacagacagttgcaaactgactttgtgggtggtgggaatcaaactcaggtccactggaagagaggcctggctcttaagtgctgagccatctctccaggcctgactgtcaactttataatcattgttcccctgtaggaaaagcatgctgtgcccataaaccattaactcagaatgcatagtgactccgttccttatctactaatttctgacttagcaaacattactcaactttttaggttcatgttttttttcaacatctaaaatagattgttggtggtgcacgcctttaatcccagcactcgggaggcagaggcaggtggatctctgtgagttcgagaccagcctggtctacaagagctagttccaggacaacctccaaagccacaggaaaactctgtctggaaaaaccaaaaaaaaaaaaaaaaaaaaaaaaaagatattaaggacgatctgttttataaggattcagtgagtttatttatagaataatcacaagtgcaaagaaaacctcagtaaatattagctatcaccatatctatgatgataacacttaaaagtgcagaaggaagcatagctctttctgcaaaacttttgtttcaatcaactagaatcacagatatcataaacataaaattaatccttgtgtggaattttttaaagtgctaatttttaactaacaataaagttttaacatatatgtcacattaataacagtatacactttgagagatagaaacatagagaaacctagccacaagtgtgactaaaatggatgtaaatactcaactgagaccagaacatatgcatatatttaaatatttttttatgtttgagattataattacataatttcccccctctcaaaccatccatgtacttacccgtctttttcaaatttgcagcctatttttctttgttttattttaaagagtccaaagcacttccttagtctattttttgaacatctgaataatctcaatgatatttcaaaatccttcctacagcagtgttcaaatgtagttttgtatgctaaactttatagaaagaaataatggaccaataacaacttggtttggttagacacagtgacatcagttagatctgatctttatatatgttgcaatattctatttctttgcattaataattagtttgtcaacaaaattttactaaacttgaattgttatataaggtggagagtataaataatcagacgttgtgacacatttcaaaacacaaacttctatgaatgttcttcttttgggtatatgcctaagagtggaattgctggatcttgtggtagactgattcccattttctggcatatacacaaaagaagcacattcatacaacaattgaacatctgttcaatgatgttcatagcagcactatttgtaatagccagaaactggaagcagaccctcaaccaaagaatggatagaaaaaatgtggtacatttacacaatggagtactactcagcaggaaaaaacaatggaatcttgaaatttgcaggaaaatggatggaactagaagaaaccattctgagagaggtaacccaatcacaaaaagagaaacatggtatgtactcactcatatgcagattttagacatagagcaaaggattaccagcctacaatccacactgccagagaagctagtaaacaaggaggaccctaagagagacatacatggtcccctggagaaggggaaagggtcaagatcccctgatcaaattgggagcacagggaagaggtggggtagggagctaggagaatgagaaggggagaagaagaggggtgaggaggacatgagggaacaaaaaggttgtgtcaggggaagaatagaagataacaagaatggagataccataatagagggagagattttatgttcacagagaaatcaggcactagggaaatgtctggagatctacaaagatgacaccagctaacaatctaagcaacagaggagaggctaccttaaatgccctcccctgataatgagattgatgactgacttatatgccacctgatagctctcatccagcagctggtggaagtagaagccgacacccacaatttatcactgaactgaactggaatccagatacagagaatgacgagtgaagagcaaaggggtccagaccagccaggtgaaacccacagaaacagctgacctgaacatggggaactcttgctccccagactgatagctgggataccagcatgggactgaaccagacccaaggaacatggttttcagtgaggaaacctcggaaatccacaggacctcctgtagtagttcagtacttatcccaagcataggtgtggactttgggaatccattccacatagaggaatactccctgagccaagacacactggggtgggcctaggccctatcccaaagggtttgatagactctgatgaccccctatggaaggcctcaccatccagggggagcagaaaggatatgtgataggtagggttttagttgggggaggtggtaggggaggacaggaaggagaagggaactgcaattgtcatgtaaaacaatcttgcttctaattcaaattttaaaaatctgaaaaaaagcaaaccaagaaaaaaaaaacaaaccaatctttccatatttactcttccaaataaaaactagaatgtggatcccaaacagctaaaagtaaatttcactgaaatatatgtgaccactcaggagctcaaacaccattattttcaggctgtttcatcagcaactaaacagcccttttatgtcacaaatggctgcagctgcgttgttcacaaatctcagagtgatccacatcaatgtacactcttcctacaacataaaaaaaaaggtctaatcctttcatagatgcaacaatgaagcccagagaggtgaagtgatttcctcaaaatcatgctaataaaggtggtctaaaacacacattcaaataagctgggtagccccctatgttgttagattgccatgctcatggcagcattgctcacaattacaaaaccctgaaaacagctgtggcagtacaagaagtttctaattatgttaggaggcattggtaaaaagtgtaaattaagatggttcagatgaaaaggtgtttgcttcttccttcagaagctcccatttgtgtagttctgagctagatacagaaaaaactatctaattatatagcttctatgtctccctaaaactctttatagttcacaaagcatataaatgcctgatgaaaaaaaatccagcacagcacagtaagaaattagaaattaagaaacccttcagttagcctggtagtgtagtcctataatcctacctactcaggaagctgaggcaggatgggtggtaaaaagatcattagtgacagtctatctcaacatagataggtataaaaaggctgggagaggggaaagtacagctgagtgttaagagtgcttacctagcctgagtggaatcccaggttcaatcccaatacagcaaacaaaacaaaacaaaacaaaacaaaaaacaaacaaacaaacaaaaaaacaagccttttagattttctgtggggaaaattcataaatcaaatcatgaagaagcaaaagactaaaactgtaacaaggtgtgaacattaagaaagcatatttcgaagaaagaaaaaagatgagattttttttacaaatcaatttagttttgtttagtgttttgatttctttgctcttaattcttaatacattttctaaagagttgagtcttcatttgtcatatgtgacagcaagtaaggctttcataaaatcaaaggtcatatatttatagatatgatttgaatgctgttctgtttttttatttcagatttttagtctagcaaaaaatatcaagcaatgttattcgaacttcttcagaaagaacaaaaacattctaaaactgaagtgaaacttcatttgtatctaatttttatttatttatttcatttgtgggcaaggtctgagagaatatcaaaatagaaagtctaactacagatagcagcatgccttggccagcactggtttaggcatattcctattcagggctttgagaattacccttcagttcttaccagttccgtcatgtgcctaacaaactgtccaaatacctgatccaaaacttgtacgtgcttattaaaggaacattaatcagtttccttacacccccatatggtcctaaatagaaacacttataaatctgctaatgtgaaagtatgatggagtttgaaaaccaggtatcggagagataataacaaaattaaggaaggaaaaatgctgtaatttttaatctgttgttatggagtactgaagcacactacctaaatctaaagcttaatgtgactgataaaataaatgaaaacaaaactgatatgttgtttattaaagccactgaagatcagagaggcaaagcagccaagccagtagatcttagctctacccagctgaaatggcgatcctgtatcctcgaatcctcagaggcaaaagctctcagttcctgtctcctcctctttttattcctctcaccacccagccttattactcctgtctccacctccccagtgctgggattaaaggtgtgtgatagcaggtgctgagatcacctttgtgtgagctgtttcttttaggactggatcaatttcatgtagtcagtgtggccttgaactaacagagttctgtctatctcttaatcctgagtcctgggattaaagatgtgtaccaccaccacctagcttctatagctaactagtatggctactttgctgttttgatctccagtggctttaataaatcataaacaatatttcgccacacaaaacaaacaaaacaaaatgaaaacaatttatctctggtcctaagtaatatgtcctcttcaatgctggggaaggacctgttactgtttgaaaaggtgaaattaaattgtctttggggattgaaaatttagttcaatggtaaaggtaaagtgcttgctggtaattccctaccccagacctgacttcagttccccaaattaaaaaaccaaaccaaatcaaacaagcaaacagttgtctttaaccaaatctaaatatggtaatgactctcttttctcaagaagatgataacagctgcaaacatatgaacacatagttcaaaaagaagataatagaatggtcaataagttcatggaaagatgctgaacattactaatagttaggaagacaaatattaaagtatgatgaaagttgttaatggaactagaaagataaaacgataaaggtacagagaaagtactttggcctcttcatatgaaggccctgaaatttcattccttagtgtctaccaaagtaaaatgaaaatgtctgactataagaacatttacaaatacatgcgtacagcagtcttgtctgtctcaaaaacctggaaagaaattgtggtatatccattcaatatacaactactcaacaatatactgcaaatatcgataacaatatgaaaaatgttctgtcaaataaacctgacccaaagaagaagtttaaataatgtgttccatttattataacacattctagtaaatgaaataaatgtattaacaatagatccaagttttctactactgggagtggagtgaaagagaataaactatgcaattcagtgaatattcatagtgtgggtgaattcactgtttgtaacccattctcagtcaagctgtttttgaaagggaatatgaagttatttctatctcaagatggcctgataatactgacaataaacatacatttgaactgtataatacttttttggctgaaaaaaatgtttgcaaggagtaggaattaaaagcacaaggataggttaattttgacaactccatccttacaaagtacgcatgatagtcagctttgcttatagcctggaattaaatctcagcagaaacattgttaagtcattaccttctgtgttttgccttcaaaacttctactgcacgtgaataaatggatcccctctttattacattattactttatgggattttaatgcattcacattctttgagtggatcccatgtcccttccaaagctgtctatgtaccagatgggaaggaaatagaaaattttcactagtccaattttttggggggtttcccccataaacatgaaaaaggaaaagaaaatcaagatgttctttaaaatcccctttactatagtttctttaagaggggttaagaaagctgccacagtcttaaagctctcctgctgatagcaggagagcagcagagcctgccaccataaggttcgactcctggctgagagctgattctttctcaggaggaaactgacaatgaagtgcagaacttgtccccagattgcaccagagattatcccagctggggttctgaaaaggactctcgcagaatatggccaaagagaagcccctttggggcacagattttagacacattggccctatgcagttggtcatggccagataactagggagcaaacgcatttcaggttgacagagcttcacaggagcctcttaggaggaaaatctttttaagggtttaaagggaagttgtcgatatttaaagaatagatgaaacttttgcaattttttggctacatttcaagcaaggaaaatgaagaccctgcaatatatgttttttttttaactagattttttaactagatttttccatttagttcgtttttcttttcttgataaccatggcaccatcttaaatgtgagtgtgatcctcttgttcagcatgtacctttcaaaaatcaccttgttttccagataggttttgtctgcccctatgataaagtgtggggaagggactcaactagtggttaaagggactgattagggacctgggaaactggttcaaacctgaactactacttgtatgaggcatgccatctaggaagaatttttttatatataaaaagaaaggcaaggttaatgtactatagaactgttacaaagatacaggaaaaacaaatgatacaaaaaaaaaacgatggttacatcaattgagatttgggtaagctagcatgtttgatgtttcttttaccaatgaacataatgcagagtagtgtattgacctcacaattagagacttggtgtcctgttccaccattccatgcgcttgtcttggtagtacccttgtttgaagcagcaggatggagaagggagtggaaatgaaaggaagaagggataaagtacataagcaaactacttttaaagaatgatctgctggaagttgtcctatgattgtctctcagcatagaccattgatcagacttgtcataagacttcatcttacattaaaggaaaaggaaatcttcagggcaagcctcaaacatgggttgctcttctcatataggaaaaaaataggtaaactagtacctatcagaattctccattgctgttagttcttactattgttctgttgcttagacagaacccacttgtctctccaccacttggctctgtgattggaatttgtgtatttataagctgtgctccttttaaatgtcttcccttcctttttaacatgtgttcagggtaaatgcaatgctacccttttcttatgttcacacctaatcttggggtgatatttataattcattctgtgcttttatcaacttgtaaaaatttattatgggctgaattgtatcccctcctcctactttatacagtctccagaatgtgactggcatgggagatgaggtaattaaagaagtaattcagttaaaatgaggtcattattagaaccctatttcactatgattggagtcctttcaggaatttgttattagaacatgaacccaccgagaaaatatcacatgaagtcaagagtacaacatagtgggcatctataaacccaagagagatattgctgaagaagacaactctgtcattctttgaccattagaatctagtatccagaattgtgagaaaaatttctgctatttaagcctgtcagtgtatagtgttttgttaagacaaccctaacggttaagagtgataggtaatctgttagcttgctggatgctattagggtctctgatagatgagctctccacagagggtaaggatgttgcaagatatttgtttacaccatataaaaatgtgtcacttcgactggtttaataaaaagctgaatggccaataactaggcagggagaataggtgggggttccaggcaaagagaggaatttgggatgaatctgggcacagaggagacacttggagatgcagaacaagtcagaagtacagaacaaaagaaaggtaaaaagccatatggtaaaatgtagattaataaaagcaggttaatttaagttataagagctagtgggacaagcccaagctaaggatgaacttttggaattaataagtctttggcccaaagaaaaattcttttacatgtgatatccaacatgggagcacgtatttccacatagaacatgagaaacctttaacaacaaagttctaaacacacaaaggagctagacacaacttcctagtcctgcagtctctcagacaggggccatagcatacagagatgtggctccaggatgctgcctgtgggctggagccctgctgtcaatgccagcagcatgtgctaagacaagctgctgacatggcagtttaagatttatctcacttcgttagagaacactgcagttgtttaataaagccaggttcagacatagaaagcctcgaaaaaggtatagtatgttttaaaatatgcttaaatgctgaagaaaggaaagaaagtgggtgtagacagtcatagaaaaaaactactttaaaagtaataaagtctttaaagaaagagtaaagcaatattttttaaaaagccatgtaaaaagaaatgaccagacaccaataaagacaagaaaaacagcctaggtgatccagcctctcacaatgcctctgttgtaatttcctcaaaattctgcacccagaacaacttcaaagctgctagctgagatggtccagcctcacagactactccaggcaagacttcagataagctttaaactttcctgtcacacagagactaaaccagaaatactaaaactagctctttcaatacttgaccatcataccagttttcctagggtccccgaaaggtgctgttcccccagacaacatgaagcattctagagaacacaatgcccagattcttaagaagtgggtgggtggtttttgattgcttgatgggttatgaatgtttgtcattatttaggggggttggttacaaattgttactggatatggtaagggagaaaactaagcaaggcaggttggattcaaggatctctttctgaaaagagaaagtgggatatggaaaggataggataaaagggtagattatagaatctactttaaacaaaaaagactattaatctcaaatattttacattagtatgattttttgtgtattgatacaaatttaaggttatttccattagaacctactctacatatgtttctgctctcttttgagatatttttgtatattgatataaatttaaggttacttttttatactgaatatatgttctactcttttaagatatatctatgcaactaatttaaaaatataatgtatgattaagaaatagaggttagttgttagtcatctataatatcaaactttagtcacgttaagtatgttttcagggttaaactgaaaacattttaggtagatagatggtcttcaaatacttcagagatcttcagaatgtgacatttaaaatgctttaataacctaaggctattcatgacagtgagacatggtctgctcctggcagtaccaatttacttgaaaaaaggataattggcatcaaagaacctccaaacggagtttgccttttttgtggcaaagtaagccatttggcaagaaattgcccttgtctcaactgctggcagtatgctgcccaaactggacaagtgggacacaatcagaaagtgactgctgaatgttgccaagacaatataggaggtccttcaaaattcctgtttcacagaaaactccatcagatattatctgtccataggctgaagatagatgctcagtgttgcagaggatccttaggtgactgacaggccaccagttatttctgttgtttcagtagttttggaagttgtttgcttggcacttcctgtttactcaggtaatgttataatcttctcaggtctctaatggagttgaagacaagatagttatagttacagttttccttgctacaaaatttttaaaaatctcataaaagaaatataaaattagccaggcagtggtggtacacacctttaatcccagcactttggaggcagaggccggtggatctctgtgagtttgaggccagtctggtctataaagctacacagagaaaccctgtctctaaaaacaaagcaaaacaaaacaaaacaaaaaacaaacaaaagtataaagtatttaagattgagagacaaaagcttaaattgtctaagaaaatgtttgaggtctaaaaaatagtattaggatggtaatacaaattatgatagaaaatgtttaggtataaaattttaaactcatcaaggtaagatatataataaatattttctccaaatatgccaaatacaaatggactggacattgtgaatgcaattcttacctcatactcatttttattgtacatagttttactatgttagagttataacctttctattttagttagataaaagggggaaatgctgtaagacatttgattttactgtgtaaagatgtgtcactgtgatttttacaataactaggcagggggaataggtggggcttccaggtaaagagaggaactggggatgaagcttggcacagaggagatacagaacaagttggaggtacagaacaaaagaaaggtaaagtcacatgataaaatgtagattaataaaagcaggttaatttaagttataagacctagtgggaaaagcctaagctgaggcccagcttttataattaataagtcactgggtcactatttgtgaactggcagctgaaagaaaaattcatctacataaggaggtgtggttttaagttcaaagagtctgtttaccaacgtgtgggtataggggaagagaaataatagtgcattaacccagagagcagcagagggaaagggacttcagtagaatgtcctggccttactctctcttcttttacaataattctgtgccagtgcatctattcctgggaagacatgcgacggttcaggaaggaagtagaggagagtgaaattgtagataagctggcccagggagactgagtttcagtttctctgcatctccctctcatctgttttccctactcctctgcccatatggagtttggagtttgtgacatggcagctaacacagcacacagggcagagttccaataatatcaggtagctggtccagtattttttagactcagtaatttaaatgattatcagcacttcttctagattttgtcttcctcctcttcctagaaaaccttacttgtaccttaatcaaatgttacctctgtgactaccatgtccccctttcagtttgttttcatccttcttcacaaatgaaaacagaagcagcagaaacaagagtagtaggatcaacaacacagaagaaacaaaacaacctaagccaatcatctctactaaaccagaagtctcaaaaacaccaaactctacagtagccatttcaactgattttactcaatgattccattttctctatttctcgtagtaatattgcagtattagcccttacttcatattaagattgtggaaacttgctagtgtcctttcagctttcttaaagtgttactacctctagcctaccttacccttttctgacaggtaagcattacagcttctgaagtctacaatacaataaacttccatgattatatgattatatttctttccaaaacacaactgccaaatatagaggtgtggatttttgaagagttgctaacaagttgtaatgttttgattaagcgactaacttaaaatatttttataaaattactcatacttctgttcggtgctctctggtttgctttcaggaggcacaactcccactaaacattaggctccatttttgatccacttatccatgcctcacccagtgctttccctctctgtagctggatgcttagaaactgatgaagttttggtgttctagaaaagcaatgctgtaagtttggggtcttttagtcagcgttgacttaaaggaaaagacacaagcacttcatgcagctttattattttgaattttaaacttaatttcaagatatgcatgtttaatgtgattaaaaattctttgtcatgcaattttacatatcttttctgaatgattcacatcaaaatttcttcttccaccagtctttggcacaaattagtgttcattaagtattatttttctgggtgaagaatgatataacatttaacaagaagtctgtaattaccatgtcacacattcgaagctacaaatagggcaatcctataaagcatattcaaactgtctgtagcttattttataatttcagagtgaggcaaaggttgtagtgccaaacaagagtactgaacaaaatgcactaatcatcttggaaaataatttatttttctgatctttgtgaaactagtactcagagttcctcatgattccatctcagtgaatctccagactttctatttaatcctctctcagaggaaaggaggaaaaacgaagtaaatacaaattgtattagagttgaaattttcattattctttcagggtcatttatatctcagatgctacaggacctacatgtacctttgaaaatattagagatctgaaactatttaccatgagtagctgcaatttctattcagctattagatgtttataaaaacccactataaggctacttgtaaacaacccatagttgtgtatatttaatatggcagattatctattatattgggcctaaggtatccaaaattagattctagttagtgaagcaggccttaaaacatgatcctaatcatttttggactacagtactcattgaagcctcaaacagtgctcagagcatggtctatcacctcatggcaagtatgggtgtgtgtgtgtgtgtgtgtgtgtgtgtgtgtgtgtgtatgtgtgtgtgtgcgcgtgcatggcagcagagggggcaaggttcatgagtgccccagcctgtatgtggcaatctaaggacaatttgtggtagttgttttttttttttttttttttttttcccatgtggggtctgagatcaaccttaagtcatcagcattggcagcaagtgcttttactcactgggccattttcctgtcgtcctttatgtcttaaaagtgatcagaaagcttatttgacttttacaatgtggtcagagtaccactgtctcccaagttctcctgttacctcacaaggttatgtggtatttatcacctttccatataccaaggttccaagagtgcaataggaaaaatttctttgaagtattctagagtgcactttgagtcctccaaagtgttttcttttttttttccccctctggatactgaggatattaaagtgcctgagtttatttctttgaacagcaaatcaacatcatctacttcatggcatactttcatctttgaaaaaaattgccagggataattttcttattctttctcagaactgaataaaaatgaaaaagtgggctaatcaaattggtaatgtattaaaaatttggctaatgagtgattttggggatttgggaggtaggtaaaatggacacagtcattaatcacattttgacaaatacaaacatctatatacacataatgttagagaaaaggaacagcatccttcagtagaaatcttgaaacatacaaatgccgtgtgtacattgtccagtttagttgccattgtcaaatgtagttactgagaacctaaaatgtagctgtatgaatttttcataaaattaatttggaattaaattttaatagcacatggctagtggcaaacaacttgggagagtatgggacattcctgtcaccctagaaatctcaccttctttgtcagtaaatcccactctgttgccattgccatcacagggaaacagcagttttccttggacttggatttcatataagtggatttgctcatttgcactcagcctgttgttgttgagcataatgattcagagatgtattcacgttgttttgtatgtcaatagtcttttcaactgttcagttgcattacagtgtgtgagtgcatcacaatttgtttatgcattctttagctgatagacatctgacatttagattgtttccagatatttgggtttaatggtgcaaatactgtacttgatgttctgaattaattgaagagctgtatgcatatataaattatactttggtcttgagcaatggttgtcaattcatgattctattatcatctttatgcactggggtaaaagtctaatttcaagatatatttatataagaatagacagacttcaggatgtctgaataatctatttgtagtacttaatgaaaacacaattagaaagatgaattcttactgcactgtttcctaaatcaaagcatgctttcttctctggggtgctccagttagacatgatgtccagacttgatttgccttgctgcttgagaaggactacacaccactgcagtgttggaatcactttgacctctataattataacacagccacagaatttcagatctagaaaagtcactcagtcatatagactcactagcagtttgaacactgtacacacttagtcaacactagcagaaaggaatccttcatttcactgatgggaacaagattctattgtgtgtctcaattgaagagaacagctagtcaaatggaagattttaaaagaggtgtgatttctgctttagaaaggatttgatactaatttaatggtaagctgctgcagcatacattttcaaaatttcctatgcaacttgttggaagcaaaatcatggcatatcagtattttatctttgcatacacatttttcttttttttttcaagcattaacattgaagttctttagtagttcttgaatatgcagtaggtgtccatacaaggagatgtcataatagatatgttgaaaaggaagtttacctttaaggatgtgctagaacagtttatatagacagagctgcttttttcaagtgttttagacacaactgtgttcaactgtctctcccaatcactacagccctagagtggaaacaaagttcgaaggaaacaaccactgaaattcacagaaaaactaattgtgaattgtacacacaggaactatatctgcctcatttttggaattcagcaaaaaaaaatggattgatagtttattgaattgtcaaggaatgtaagatacctttcttgagctcagcttagatttttcattataaaaacaatagctgtgaacactcttctgggtctttccaaagactcccttgcaagttatttctgaaatatatgtatgacatatatgaagataaaaatcacacagctttagagatgacctgaaaagagctcttgccagaacttgagaagcaacaggatttgcttaatatctgtatatataagcacacatatatgtatatacatacatatatgtatatacataaacgatacaaacacatgatctatcaatatgttttgaattttacagcttgcattgtagctaaataacactgaaattaaatattcaccttactacaattagaagatatatctttaattatcacaaaaggaaaaatagcctaactttgtaacagttcatgtaaataaaagtatgcattctgaaagtataaatagatggtagagaagctaggaataaagacgtctctaaattgctcgaaaccgatgttacaatgttctaagcgcaaaggtcacacttttcctaaaggacactggctcaaagtgtctatttatacccttgagacagttttgcacaagcttcattatgtggtttcctttcgtgaagattaaaagcagtaaattaaaagggtggggaggataatagaactctgctcactgacagcagtaagaagcaacagctgagagtgggcaaacaggcaaactaacagacaatagggctgcagcagcaaagctgttcagagccttgtagtgtctgtcatccagcagtcctaaccaacatcatagcagagacttgatctgtaaatgttgcaaaaggactattctaaatctgaagagttttaactgctgttagtcaccacggtgtcatttttgtctaccaccacagtaggcttgttttttttttaatgttcactactttaacttacaatcaagactataaatcattacggaattatcaaagccttcagtattactcttaaatctattattccaacagttggttcctagaatgtttttacctggtatttcatggcacagagaggcaagataaaaatgaccgtttgttttccctaaaacgagaatattatgtatccgatagaacaggtgtcaggattaaatgagataatgtatgtaaaacacttagcacaaggtctggggcacagaaaaggagctcagtcttattttaacagtgaactcatgccggcccaaatcccttatttgcaggtgcaaaaattaagcctcaagaggagaactgacttcttaaggctctacttccaatatgttattgtcttggataagctgcttagctgcaaatgttggagctttggggtattggcgagcccgggggcacgtgcctgctggactccagtgtgaggagaattggacgaatatgcttgaaccatgagctattagaagctgtgccttatcaaccggagtttgaggtaccaggttgtgtgctaatcacgttcttcacggacggaagccattcctgtctcaaaaaaccggccaagacccttagctagcctaggctgttaagaaatcggataccagcaatagggtcccgggtctggctgagacccagcccgtcaactctcaaggaggggttgagcatcttaaggactgactacccaagggtctccctggaaggtctagcccaccccggtatggaccctcgtccccgggaggcacaaatcgccttctccttagcacttgctcccggccctgcagggtgagaactttgcctctgggttccgcagggagggctccgccgcgccgagccggacgggccacggttcgcgcgcccaggctctcgctccctaagatggcggcgaaggcaccgctcacgccccgccgcccgcgctcccggagccgcggccggcctcaggaggcgcaagggggcgagcgcgcggacggtggaggggagagcacggcagagactctggaggcccgcgccggctgcacagagtgcggggaaagggatcaccgcgaggcacaaacgaccggggaacatcaccaccggcggtcatggagagggaggaaaaaaaaaaaaaaaaaaaaaaaaatcctgggggtgggggagagggggcggagcgcagcacatccgggcccttctccggacccgccccggaaatgacgtccagcaggggcggagtccacccttcaaagtggggtcggcccccgcagtagcgcgcgtctccccgtgttggggccgtcgtcgccccccccctcccccccggcttcgcggtttccttctcggggctgcggggcttctgggcaccgagctggctgcagaggcaggcggggctcgttccacggaaagtagccctggcctctaggccctcggctcccccggctccccggcgtccgcagtagcgttgctgcagcccgactcgcattgacccccccccccccccccccccgccgggcccgccaagtctaagcgcacggcggggcaccggcgtcggaatcccgaccgcggccccgcccgggctccgagctgtcagtcacggcgccgaacccgcttcttccggcgcgctcggtcccgccctctcccctcctccctcccccgcccctccccgtgcgagtgtctccctctccctcgctccctctctctctctccctctctctctctcttttgtgagttatagcaaccgttgccttgtgaatcaagcgccatagtcaccgtagtcctggcgactgttacccatcaacaacaactactcctctcctcctcctcttcctcctcctcctccccaccaccaccatctccatcacccaccaacaacaccacaataatccacagccaaggtgaatattcttcggtctctacatgtgtgtgggagcgtgtgtgttcgtgcgtgtgttcgtgggtgcgagcgagcgtggctgttgcggggtctccctcctgacaccggctgcggccgctcgaggggctcggtccccggggcttgtttacaatggacccgcgcgcggcgggctcgggggtgtgggcgccgcgcgcctgtccgcccggccggccggcctcggcgctctgggatggagcgggagccggggctgcggggcgagcgagcgagcgagcgagcgggctaggctggggagccgccgctgtccgtcgcgggtgtcggagcgtgtgtgtccccccccaccccaggtctgcggacactccggaggaggggcaggtggagagaaggggctcgctttctccctctctctttctttaattcgctgctttgcaaagctgcctggtggctgctgctgtccaaatcgaaatagacagcagtgagcagggggggaccccgaaaggtgctgtgctgctgttgttgttgttcacttgcggggccttgttgggggttttgttatttttatcctcgtagctcggtgaacttttcccgtagcccgctcccttcgttttggcccctctttgcctgccgagacacgggctgcacttattggaccatcactggcctcacgggattcctttttttcttttaaaactgtatttttctttgtgctgcaaacagtcttaatatccattcagcagtcttccctcccccctcccccctttgcacacacattgaaaccaggggcctctgctgctctgagagatttttttttttaagtctgtctctcttttctctcctcttccctcttccttctctctgtctcctctgtctctctctctgtctctttctgtctttctccccgttccccctccttttcggtgtgtgtttgtgtgtgtttgtgtgtgtgtgtgtgtgtgtgtgtgtgtgtgtgtgtgtgtgtgtgtatgtgtgcgtgcatgtgtgtgtgcctgtgcctgtgcctgtgtgtgcgcgcgcttgtgatttaaaccggatgcagggcatcttgctacttgggttggtggttcctgacagcggtttatccttcatgtggagatgggaggggtagtcctgaggttctgtttcactttgatgcacctccctccccacaggagagtgttaacaattttcattgtggttttgagactttgtctgtgatgaacaggaaaaggacacaaggaagctttgtgagaactcagttcacaacgctatttgtgacagttatgatactttgagagtttttttttttttttcctcacatcttcatctctgttcctttcccttggagagttgaaattgaagtcaagttgttcataaagaatgtatgaagcttctcaacttgaaacgtgtgtatatttcactttctttgtggctgttaagatctaggcatgtgtgtacttaacattctttttgttgactttctggttttctttggacaatgatttaaactgctcagaagaaaatacttttaaagtatttctttggagaaaatagttgccccctgtagatttgaatacttaacagttctcaagtagtatcttcttgattggagctaaccgggttttacagatcctttaattttgctcattttcagcctaacaattaataggttatcaacaacaaaaaaattgataatgactgttagctaaaacaaacaaaatgtattactatagttgtacatatttccaattcagattttaaagtgcttatttaaataatctttttaacagcaaacatttattgatttaactgacagagcagactgtgaataatgtgacagtattaattattcttgagattgtcaatgaaggggttgggtaattataatgccattaaggctaatattttgtaaaataagagttgtgggattgaaaaaaaacttaccttttaattcatttccgtatgattgttattttaaatgaaggtgatatttgattctaaagaagtctgtttgtgtctctcaatagttactcatcccttccccagcctgtcttcgatgcacagctcaatgctaacttgtattttttcctttcctttcctttcttttttccttctccttttaccccccccccccctgttcaggtgagtgtcaaatgcctgaacatttttcgatggtgaggcgactggggctgaacttaaaaagagttttgccatttatataagttttggctgaatagattgtgtatactaaaatgtctttgcttaatatttttatttgcagtgtccaagaatgtttcagatactttttactcatcaaacatgtatcaggttttcccaaatttagtgttttttttttttcaccttcacaagttgatttgaaagtgaatgtaacattggactgtattaaatagcttgtccatttgaaacaaatctttgtgttctaagagttgatgttagagatactttggcttctgataagatgcaattagttttatggcttgattaacttagaattataataattgatctttaaaattaaatacaaagttaaataccattgagttcattttttccccatattttcttaggagggactatactgtgcattgacagtctttgttttcagttttgtagactaacaaatctgggaaagtgatgttattttgaaatgagacatattaaatagtagcattttaaggagctggatatttgtgattcagtgtgccatgatgcctatctcagtcttttggaattacaccttgtctagtatactattctattaatttgtatagggaataggcatagtaaatttatgtgtgataatgcattcctagaagctttctgtcatttcacactgcttgctttggcgtgaggtatttaggcttaatttcgaaaatgctgtattttaaatccagtattcaaataatcttgtattctgtggaggtactcacaaagttgttagcttgtaagtgagatagtgagatattcttttacttaaccaaacaatcttttttaaaaaaaaaaaacaaaataaaaaacccccacaaaactctaaattaactaattatggcacttttttaaaaaaaaactactgaaaagtaaaaattttcaggtcacacactcacataaaaggatggatcataatatcagatatgtgggacgagttaaatttttttttttctgaatactctagtagcaatgtgattttgtgatcctcatggtgagactatgttacacgaaatgagaataataagtaagtcaagttttgaattacgaagcttgctaattttttttctgagcatttcactaaatatcctttattcacttggagttatattaaaaatagtttcccttactgcattatttgccttagctctttaattctttaggtatgtattaccagttgtcatcacaaaatagattttaaattcttttctgttcacagttgcatagtgttcccttgttttggaaaaccaagattaagtggatttgactaaatttaacttgttagagacagatggttgttttaaacaggtgtcagtctctctttttcctgcattgttttggaacttgcagtgggtgacaaagggttgtccaaagcaggtggcatcatgttgagtttgttatatcatcttttagttaattattttcacagggagagggttctttctgtatgtaaaagttgagcactgtcagtctttgaagtgctctagatttgtaactgaactcactagcttttagttgtgaatatcactgtgttttcaaactgtaggaattgtagattcatttgctaaaacagctatctttccatccttataaataatgataaactgactttgaattcagaaaaaatatattaacagtttatatattcaagtcaaatttatctacagaaaaacaggttgatttgagtaaaatgaaatttagcttacataatcactaaaattttgccattccctatttcaagaattttattgatagcattattttaagttatatattggaaaatgtattattttggttggttcagtattttaaaaccaaaacaaaattttctgacaattgctatatattttaaaaataaattgtttttgtttagccatgttaaatatgtgtacccaaataaattaagaaagtatcacccaccctatagattctcttaagttttatttttgacttatgattttatccttttatttatgggaattttatatatcttataatggatacaccagagggtgctgtgctgtttgcaatataacattattttcactaaaatttgaattgattagaacagttatgtaaagaaaattttagccacttgggcatgtaagcatctggcttacttctacgaactttgacatttaatatactgctttccttgacatttttttgggaagcctgtctatatagagagaatatgtgtaacactgtaacataccacctccagtaataagctatatgcctgagaacatagccttggcacagactaagttagcacttagtcttatagttgaatacattggccatattatgaaggtatttcagtcttacgccctggaactggaattaccaatggttgtgaatcttcatgtggttcctgggaacagaacctgtgttctttgcaggagcaacaagtaatgctcttaatgctgagctatccctcccaccctgagatttttttttttttccatcttttgagtggcttctttccttactgactgtacttttacacatgagtggcagtctttcaaactgtagtattttctttaagaaagcttgggaaagcatagttacgttgtacaaacttcagtttgggtaatgatgcactactatcccagttcagctatagtgttttaattgtgattttttgaaaagtaactatgagctgtaacaatttgtgttcaggaacaccttgatcccagaacttcataagagagtagcatttccccccacccccaatatgggtctcactacaatagtttagtaatttttctctcaactataataattcagtcatctttaaaagatacaatcctttgcagtttgtcattttatgccactgaggttttaaatgtattgtctatatattaaaactctttgcattggaagtcttatacttcatgtccaagtgtatgtgatgaaagttgaggaaataacttttctagattattactaggtggatgggacatcatgttataggctacatgtgtacaggctttagagtcagttaatctcattaactctgtgactgtaaacgcagttagttgctttcacttactatatcctgacatctctgcaatggcaaagatacgaattcatgtgctgtttgttggtcagtttgtgaatcagtgcttaacgcctattggtgtttcagttaggaaatattgagaagctgtcttattgctacttaagaatcgttttgttctaaccattcctttgtcataggacttgagttttgaaatattttcccactaatctattgtcattaaataattattctcttttcctcatttgacaaattaaaacaaagctatgaagcctttagttagaggcttggattgccatttgataatcaactttttaaaccatactaaattaaaagaatgctattccaaagctttgtcttagttttgctcacaggcctatgatgaggtctttttgctgtgtttacctaacttctctggcctagagatttttatgtagaactaatgatgtaatatttcattatcttattcttctattgtttacttcactgtcccatttatattttctctttacatgttacatattaatgtatttgaaaatatctggagttctcttcatcaactttatgctacatgcaatcttcattatgtagtgacagtaaatagtgtagacagttttaaaacatgaattcattagcagttattccacaattttatagtgtgctgcttaacaccattcctaaggggagtagatgaggtagccactgatacacccatttagcattgatgaataatttactaactgctacttatgtggtagagtagcttaggaacataacccaggaggacttaaaatatgaaatattacacaagaaaatgctcttttgctttctttagatgttaaaaaagtttcaaattaacattttcaagttggctgccacatataagggtgctgttcaataattatattgaatagctgtatttctgttttctgagcaatttgactagtagtaaagtatttttctcattttagagttatttaaataatcctaatcttaaactggaaatatgatttatttattctctctgtgtcatccaggccagccttaacctcatgatcctctggccttattttcctgggtgtgggattacctgtgccttgccactgtgcccacttcaaatgtgatagattttcaaaggagccttggaagaaggccaggaaatgtgatttaaatggatatactgtactatttccaaacatctgttttcttctagacaatttctaccttcttgaacagaaatgtaacattgttttattagtgatgtaatctgaatgttatttttatttaaaaggtttcttagccttggcttggtggcacatgcctttaatcccaagcacttgggaggcagaggcaggtggatctctgtgagttcaaggccagcctggtctacaaatggagttcaggacagcaagagctgttatacaaagaaacactatcttggtgggaaaaaagttttcttacttctgggtatgtattgtcctctggcaaaatacttaagggttatatatccaggctgatccaaaattaatatgtttgcacagtagtctttcttttctagtagcagttatggccagtcagtactgcttgcctttgttttatagtacctggccagggattcccaaaggttcttatatttcctgctgagacaaaaagctaagtgtgggctactagaagcataaccaggaacatttagcaaggcaacaggcctgagtaaaagtgagaggagacagatacattcagcaatgctagagaagaaaggaaagtatgttactagactgggaagcaaagggctccaagagtgtggccagaggagcccgaagaagaggacaaaggtacccagtttgctgctgactgaaactgcagactagttacataaaatatgtgggtctcagtttctccatctgtaatataacagtgaggctgaggctatgtgatcttcaaaactctttgcaacccctatgaatccatggcaaaatttgcctgggaagatggagcatgccaatgacatggaaccagaaagaatgctgcttgctttttttttttttttttttttttcttttttttgaggagagcaacaaagaaaacccagagcccagtgatagcactggctatgcctatggcaggttctcaaagttctaccattttagtggtttctttagagaatggtggccaagtgctctgatttcctcacccacataggagtgagctgagcctcacagcttgagctcctgctggaactagcttctctaagtatgtgtgccagacaagtgtctgacagttggggctcctgttgctcaccagtgagatatttaaaacaggacataatttccccagtgtgtggatagacagaggacagggtgggagggtgtggggagaggctctaaggcaggaaacatttttgtacttaggagagagcatatattctgctgtatcacaactctcagcttgtatagggaagtatgtgaaagacagagtgtaatttttattatttcaaagttgttttgaatattttaattggttaatacaagcagattcaagtttctggacctcatttggattcatatgcttaatagcatttgtgtatatttcatataactattattcctaaaatggatgtaaccttctgcaccctgagtttctacagtttattttactgtgccaaatcactttagagactctttgcttgttggatttcttcaagctgtatacagtggcacatgcctgcattacacaccctcaggaagtttaggcaggcggattgcaagttgtagatagggctgcaaagggagcctgtgttgaaagttttctttcctttaatattgtcactgtggaggaatgggaatgggtgctgaagtggaacaaaaaacatgcacatttagagatcatatctcatttctctcgttaaataccagtaacttgtatatttcccctattttactgcattttggagccttggttggggtagatgttgcaggggcacagagtttggggaggtgagagtcagaagtggctgaagcagtgtggtttctcctggatcttgtttgttttctgctgcagtgtcatgcacactacatatacttcttaagaataccttttttttttttttttttggtttttagagacagggtttctctatgtagctttggagcctatcctggcactcactgtggagaccaggctggcctcgaactcacagagatccgcctgcctctgcctcccgagtgctgggaataaaagcgtgcgccaccaatgcccggctaaggatacatatttttttactttactaaaatgtttattgtatttcatttatcatcaagataaaatatctgaaattttttattcattagtatattactagattaaaaatatctttttcaagagccagcattgtgcttaggaatgttcatatatgattctttaagtttgtttttgtttttgttttttatttctaagtgcaggctggcattgaactcttgagcatcctgcctcaggctcccaagtgctgcgattaaaggtgtggtgtgccattacacttgtttgtaagtgatttcttaatctatctctttacgctttgctttgtatagatgcatttgtgaatatatctttggcaacaaaaagtaacattttcctctatttctattgtgctgacattttaaagagccaggagtctataacatcagactgtaacttactagcttctgattatgtctgatgaaaatattgacaagttttgatgaagtgtcatccttagggttattaataaaaacaaattattatactagcaatctggacatctctacaactttaaatgtacttacagcgtgtattttaatgtggcgtggagaatatattttatctaatttaatatatgaaagatgaaatattttgatttttgtgattatgttgcatatctcaagggcatttaaatgtcctgttttaaaaaatacacttttaaggtgtttgtaaaaaagaaatttagcttagatgctctctttttttgttttgtttttcgagatagggtttctctgtggctttggaggctctcctggaacaagctcttgtggaccaggctgagatgctctcttttatgtgtgtgcatattgtgtacaaatttaggaagttgtcttaatgcacattttgctgagggctgtaggacactctcagtttttttttttattttttatttatttatttttttttatccttactgccttctgcattgtcatcatcttggagtcacacagggaaccttccatctccatgttgttctcttgatgcagaggatccaggggaaagtttaagttcttccgggtgacctctgtgtgaggttggttttctgttagtactttccattagtggtgatttttagaggctactttggctaagggctacatgtactggagttagtaaagacaaaaagtacagttcatttcagttaaaatggggctcaacattatgttgctggattaacattctgacattctgtgcttcagaagtttgctgagtgttggaacttttaaataatactgaatgaggaacattcatgatagatgtagccttatctctgagcaaagttttgggccatctaccttccaagtgaggtgtgattcttttatctttgaatttggaaagagaatattttgattagttttaggtttgcatggacatctttatttatttatttatttatttatttagaatttaaaggagtgcaagtgaccatggactggagatgatgatcagagtaacctgtgagaggaggctagtgttatgatcctgatacccaagctcaccccttttcctccagccctatatagcagtaaagtaagaattcttttgtacacagtgtaagccttatgctttggtcactttgcattgctgtctagaatttcccttggatccattatatgaaatcttcagaggttgtagtttgccctgtggtttgaaaacctttgaaatgcttcccataggtggcaccccatgcccaggacaccacagtaagtgggagtgagattgtaattgcaaacactaaaatatagacagagggaaagaggtagtacgtgattctcagtttgccatgtacagcaaatctaataatgccactggtatttgattgtaaaacattctatcagaatgtaagacatacttggatatttcagtatgtaacttttaaatttttatcagttgtttaattttaataaatggtttacataagttgattattttgtgccattactactttggttaatttaggaattatgaactggtttagatttctattagattttacaatgtgttttgaaaagaaaataaagaaatggaatatgttagatacaaaattgcatttctccaggtatgtgaatatagttttaatgttccaaattatagaagactacaaaaatgatgaatgatacttgggcataggacaggataaaaaatgataggagataatgaaaaatggacgaaattagttaggaaaattataattaaagattaaacaaaggtaggtgaataaatcactatggatagtgaaataatcagttgaatgaaatatctatagatgtgtctgtagatatagactatgaattttaattagtaggagaaagtaagtaagggactccttaggttttgttttggttttttgtatgtgtggtaccacatttaaaatattttttataaatatttacaataaggctttggtaccttgattttgtttttgtgtctgtgcatataaaatttgactatttctggaggttatgtatggaaaaggagcagctgttgcatcaacatctttttttattattataaaagaaatacaatattaatatacaaaataatccaaatttacatctcaattggaatctctggttaccttatattaaaaaatgtatgtttgggaagcttgtatattgtatatgtactataaatatatattcttaaaatgcttgtattttggaatatattaaagatatcaaagaagaaggttatagtgaacctggtgtacttttcacatagacttcacagttattaccatctattgttattaaagctatgcaataatagtgtgccttggtgcatgcctgtagtcccagctatactggaggttgaggtgggagactcactggagctcagtaaattaaaggtgtataattgaaagacttgttactaaaaataactctaatccttccttatcctgtgatgctttgaagaaatttacaatttaagaacagtttcagctgggcattggtggcacacgcctttaatcccagcattcgggaggcagaggcaggcggatctctgtgagttcgaggccagcctggtctccagagtgagtgccaggataggctccaaagctacacagagaaaccctgtctcgaaaaaccaaaaaccaaaaaccgaaacaaaacaaaacaacaacaacaacaacaacaaaaaccaaagaacagtttcagtggaaattttaaacaatgatataatatggaggtaaagtattttaacacaattgaccttcatattgctttttccaagaatgttaaattaggaaacttgtttttgcttgctgttaagttaaagtgttagtttaagtcatttgtttagtaatgccaggtctctcaacttgaaaattgatttagtgagaagagttgaacccaaggacaaaaactcatgttttaagggtagagaaaagtcttgagataaatctttcagatgtgatggagttcatatttgatctgtcattattccaactctttttttatgggagggtttgaattaaatacttgagagccatttgtaagttgtcaagggaagagaagcaattgctttctggaatattcaatgtgctgggactagctgctaagttttgataggctggtaggatgtttgcctagcatatgcaaagacctgtgatccatcctcagcaccatgtaatctatgggcactgtaatcctagcatggggaggtagaagcagaaggatcagaagttagatgtctttctcagctacacagtgaatttcagcccatccaagattcatgataccctgttagctactcagtgtcgtgttttaagttatttgtggtacatcatgtaggaagggacatctagaagctgatgtactaattagtggtatctttcaaaagggtttgttttctgaattcagtatcttcatataatgcataagcttattttttatttatatactttttatttgactgagttaatatagtcatgaaagaaacgtttacccttgttaaatttccctagagcaaaagcaaacaaaaagctgcttcctattccgttgatcactcttctttgggatatttttttgtgatggaataacaagtattacagattgtaatttttgacatttgaatgaacaacacaaaatgtaaacatgaatatttatttaaaggcttattttttgttatcaaattatcaaatcaaggtaaatacatatattgaataaggtttgatatttaaacttgcataataactttaattactaaacgtttgtaatctaaaggttttagtgaaaatatctatgacttaaaatattttgcagtatcttttaaaatatatttattacatagtaagtagctaggctgggtagtacagttatacaaaatagctaaagctatcttgtggttacaagatcttgttctataactaacctcctataaagaaagtttaaatagctacgactggagatattactcatgagtagaatatttgcctagtgtgctcaaagccctgggtttgaacctcccaaaccaaacacacagaaataaagtaaaataaaaaaattgaatgatctaaacactttaaacaaaatgaaaaatgtaacacagcaaacaaccaatcatgtattataaggttaattaaagtggtttttatagagaatttcattgtgaaactaatgcaattatcaacttaaccattaattgtagtaactttatgtgcatttagaaaccttgtacaaaaaacataattttatttggtttttattattttacattgcagaaaaaatcaataaggcataagaaggaaatttctttcttattaacctttacaagtctctctctcatttaaatataactgcacctgggatgtgatataatttaaaaggcaggtgtttctagtgtgagaataatactgatagacatttatcctgttttggaatgaccacctaacagcaaacagctatcatttggaggaatccctgtctcttcatatataaagaacattaactaaaaaatttattttggtgttttagacattgacaaaattttgtgtctggaacctcaaatgccatatgatgaatgccttatttctttacactcaactcgagtcctcctgtctcagcttcactcttctatcattttcttcaggtgaaggagcaaggttcgtgtgtgtgtgggtctgtagtgaagacaagagatgaatgggtctcttaatatagttgcagttgcatgtgttttcaaatgacttacatatgccagttctgctagagacataattaggaaatctaaaatcggagtgcttacatttcatgtacactttggaggttatctgggtgaaccccttctctgtttctcacttgctttaaagataagaaggttgaggttaagtgacttgtatggtgaacctcatactccttgatctgactcatttcatatagctagtgcaaaacgtttcctacaggcacacgcaagtgtgatgcttttaaaattctatatttcttgtagtttgtacttttaatttccctattttctagagactgcaaccatttacaattctacattctaaatttgagtactttttaaaatttccaactgtaaatttgggtatatgaatcatttaattgttctgttttgcatttatttggaagtaaaattaattctatcctttaaaaccttttaaggttcaacaataaatgaaactacagtatgaaaactacccttttgtccctgtcatttgtaatttttttgtatgaaattctcgggcttggtgtgtacatcttcacttttgcacatgaagatggaacctaggatctcatccacttagcattggctctgccactgacaccccccccctccagctcttctgattcgaatcattctgaggattcgtatgaaaatcaatttaatttacaaaatgaaaatgcttgtgggttactctatagtgaagccaaagtgaaataattgacacttgatatagttcacacaagctgagacttgccaagctgggctttaaaggtgttgcagtactcttaaatatgaatgagtacaccaaaagaatgaatatacgaatagactgcccttaactccatagcaacgggaggcaacacattcagccatgctattatattttgtaacttggatttttggaagaatatttcatttatcaattaatggtatgagacaagtgtggcagaaataattaccaagattttggattactgcccctgcctccctgttgtagaattaggagtaaatctttgacctcaagcttgaactgaatttgctctcctttttgtgacaaagatgcataatttgagtgttagcattgttagttatgtgaaacagtccatctaagattcactgagaaggttgacaagtgaactaactctccagcacagcctgatttctctgcagtctaatttgtggcaccaaatctgaaagatacatttatataaagcaagagcaggtttcctatgggggaaaaccgtttgtcatttgctcttaacaaggtaaatccccatagacagaccttctcgtaaaactgttcccattggatttattctcaacttcaataaaaaaggagatatggtaaacaaaggtatgacgaaatattagttagctcttgcatttttgttggaaagttcccaattcttagtctctgaggtttaaaacagcacaatttcatatgaattaagtgggactcagaatagagtacacagtgttgctttgtgcttagctgatgattttgttttatggaaagtgatcagaacaatttatgtttacatttaaatgtgtctttgttgatagtatgtttactgggccataaaatagaaaatagaatgttaaaagtataattcagatgaaaagtgccaaacccttttaggcagcgaattaaaatttgaatatagagaataagtcagagtagcactgaatggttgaatctattgtgaatataggggagagtataaaacaggaaatgtactctaaatcatgaatttataacctgggttatcttttcttcaactgataatatattcacattagtgtatatttatattaatgtgttttctaacagtttttctttattttaaaaaaataacttgagtttatatttctccgggtcagaatattttaaagtagtggttctcaacctttctagtgctgtgaccctttaatacagttcctcatgttgtgatgaccctcaatcataaaatgatttcattgctacttcataactgtaattttgtaacttttagaattgcattgcaatgatctgatatgcaggacatttggtcacaagcaacagattgagaaccactgttttaatgattcctccctgcctatttaccagaataattaaaaagtatatatttccattctccattgtaccacaaaactgcttaactttggccacgtggaggtcacagtcttagatgcatttcatgcccacactttactactctgctctgcaattccttttattcagcctgcctggcttaactgtactaggaactgattaagaacatgatcttgaaatgaacacacctgggttaggattccagcattaactactgacaggggtttaatccttgggcagacatcttcaagtctgaagtagaaccgacagttctgctctgaaggattgtttggaaggccccattacatggtgcatataaaatcactatgcttgatgtgggagtgaacaataaggaagagttgccacagtgccagcatggcctcctcaactgggccttgctgattctgttctcttaaccttttgttcccagtctttattttgtctagaatgtattttgctccctaattaaatttctctgatgtaaggttaagagtgatccccaacttaatgggctcacttataacaaaactgtttccagggtactaattagaaattatgttttatagttttgttttataaatgtttaacattttcaaattgtaagcttcttgagggcaaagattatgcgttagattttataaattcagtatcagaactaatcctagaagaagaaatcaattattaatttgttgattaagcatcaatttgtaatcagtttttcacttcttacatcaaaaagttaattgccattagaacagtacatttttatgaatgccattgcatatatttacttcattttgtaccaaatacatttaatgacataagtgaaagaagttttggcattttgttaaatataatactacttagttaacagtagacttgggttgacttcagtctaagtctctttcctcttatcttttcaaatgacattttgttccttcactctgtatgcacagatgaattccatctgcccatgggtatctatagcttcttcgcaaagaagcattagcagttgtggaatgctttatcaaatctggttgtagtaggtgcatatatttctaattctgcttaccatattagaaattgggggaatttggggattttgcctattggggagctaatctgactactctaaacttcctgtgtttctctctttgctggctaggttgactgtatctatccactggaatgttaaagcaataggaacaggtcttgaatgccaatatcatcaacaagataactgggggactcataatggaatgcttatagtagtcacacctgtgatggatctgaggcatttaaattaagattgtattatggaaagttaatctgccatgaaacctatacagagactttaaattgagagcaatctttgttcttatgtggagctgtaatttaaaagaccccccccaccgtaggaacccgtcttggggggggcttcagtcagatcttggggggcttcagttggatccagctgacttgcctggttgtacctgagatgtggagtgaagatactaaggaaaagatagagacacagaatagagtcgggagagcaatccagtgaatactgaacaccccaagtttattcttcaacattctaatataccccaaccaaaaaggggataaaggcaagagacttccttatcaaaatacaaggaacaaatagacttacttccttaattttcttaacattcagtagactaaatctctaatctgaccttaagagttaagagtaaccacactttagaccaagtctattgttatttagataagacatccctgactaagaccaagcatcatacagtagccaggcctgtaggttttaggactttaatcttggaagaatatgatagctttgaactctctgcccttaagcaaagatgaagtgaagccatttttatggactccaacatccctccctctctctttttggtcactatattttcattgtacatcatccttttaggtgacaattttgctgagttactactctctgtgaagtgattctaacttcagatttgaggaggaactcaaatttcttaacagtttttaaagtgtatgttcattttcattattacttatttacgagtgtgaatggtgtttgtgaggggtgtgtgttcgtgagtgcttgcccgcgcacaagtgtgcaggtacatgttgagacccagagttgaggatgggtactgggtgtctttgtcagttgcttttccacttctttatagagacagtgtttctcactttacctgagctctaatggtggcaaccagccagccaagttaaccagtcctcccaggggatcccttgcctctgcctctccattgcaagaattgcaggaagagcatgcctgcctgtatttacatgaattttgggatcctaactctagccatgcacttgtagggcaagtgctttacccccctgaactatctccctagcctcttttttattaacttaaaaaaagtatgtaaaatgtgtatttgtgtgtgggtgtgggtgcatggttatagtgggtatgaaggtaagagaacaacctggggtcatttctgagacacctctttctttcccttgagacagagtctcattggcctgccactttgctgggtagtgagccttgaccttccagggttttgtcatcattgggattgtcagggtataccactgtggcctttggtgttcatgggttctgaggatctagactctggtactccagcatacttactgatcaatttcctattcctaattttcactttttacatccgtgcacttattgagcagttattgacacaaaatgaaccaagaagtgaactgctgtaggtatagcagtgaacaaaatggattaggtcgctgttctggaagagttatcaaacagctggaggtaaaggagaaagaaaacaaatgcaaatagagcatagtagttggttataaacactatggatagaaataaggtgaggaaggagtgtagagacaaatgagaggggtggagaaccatctgtgttacttagggcaatgcagactttgcagacctttgaacagagatgtgaaagaggcgagtctttggatggttcttcaaatgtgactgtgtttagactattgatggttgatgttggcctttttctatattagcagttctattttttctcccatttgttctcattgtcatattctgcttttctgtttgggcccttgttttaaattttcatatgtctttctctgaaaaaaaaatttgagtgtggttattgactagaaatacagggttttaaagaaagtacttgagagacttggaaaataaatccttcatgcatccaagtttagggttcttctgaataacctgcaactattgctgaaatgtattctaaatacctaaacagaactcatctgcaaaggagaaaatgtaaatttgtaattaatagaattggccagactacaacttgattagtttttctctcaatttgcttatgtataactttaacctggaaaaaaaatctttgtttatgatggattctaagttaaaagtcccacacctgtgttaaaattttaattttatatggtataggcaccatgtctcaactttaattatagtcaggagtttatttataaaactttgttttgcaggtaaagaaaggaaggattatttagataaaagttactgatggaggcatattgtcttggattttgttattttgactaatgattgtcattttgatattttaagtgtagaattttcagttactcatgtcaaaatcattttccatttcagttcactggaaaatattcactattatttgccatcatgaaatatacagcttcatatttgaggcaattgttgcataaggtacatatatttaacatgaggtagataagtattttatagcatttaagtaaaaattagtggaatttttgtgcgacattaagaaaaatctaaaacatttctctgaacttctatgttatataagcaatattatttacatttttatttctggtgtgtatttccctacgaatatcatgcctctgcatgctgtggaagtcaaagggcatcttgagagagtaggttcttttcttctaccatgtaggtcctggtgaaataatttgaagcaaactgttgtataagataggaaaccttggattcagtcctcacaaccatcaaaagtaaggagaaatcttgtatgtatgccccttgggatgtcttttcttttttctttgtagttgcaaaggtataattagtactgagaggaattctcatcttcaagttattggtcactcaccttaattatgtgacaaatcaaaggcagagagttctctgtttaaaaacaattatgaaaataaaatctatttagaacttagttccatttaacatttactgatgatatttgatttatagaaagtaaaactaggtaggtatttgggtatgaaatatgatagggtgacaaatccaggatttataatagaagacagaattgtataggtcaacatgttttctaaagcttcacggcttggtttcctttaagggtgccatacttcacaccgaagctggatagcctcaaggaggcaaggaccagtgagtaccagaaaacactgtccagcaagatttaggatattgcatagatacccccacttattttattttcatccctttgccttttagtccattctacttaactagatcctaaatataaaaatatatacctaattacttttattagattagtttttttttctgagatgattggaacaatgtaatattatttgtcaaataattgaccaggtattaaataactgctttggaacttaataaatttaccaactcatgccccatgaataatatgtttctaagtcaaatgtggctttaataactattggttactgtgtttgtatatctgtgatatatgtattttaaagttttgctcttatgtatggaatcaacattgaaattacttaaaaatattttcatattatcagtctcttcagctttagaataaaattaaaaatttattaggcaggacattagaaagtatttcagttatttcttttggaaattaagtagagtctatatttggtttttataatatatgtctactgacatccctgaatcctgaaaatgaggatttttctgagtctttgtacctttcttaggaagtaagaatgacacaagaaatacaaatttttgaatgtaagcttttctatttgttttctttgagcttcacatctgtaaagtgaatcttcgtatatctttctaccagtcttcttttcattattctctttctagtgtgtgttatctctggctgacttttcctatttgctatgttttaaagttgactttatttacaaacattcagttctaaatcttagcccaccctctgctagactcaggcagagttttttggtcagacgttgctcaaatcagtctccttcagctgtccttttggattcattgccctttgctgtgggatagttgttccggatcctcctgttatttgcttctggatactctgaaatagttgtctttattctgcacctgtggtgtgtaatgagaagaaatgaaagtaattctgagagataactgtggctttttcaaagtgagcaaggtagggcattgacagatgggtagggcattgacagctctgcatgtcagtagaagggacgaaggttgtgatgaatatggagaaagtgcctgtcctaagtttttcagattgatttttaaggttcaaaaattgcaggcaatattaatttaaccagaatgtcactgcaaaatcctggatacatttttcaaaattgtgttgttattaaataacttatttacctttttctgtatactttgacattttatgatactacatttttgtctttttctcccaacattctatgaagaagggcctaatgtttgtaaacatttaagtcagtacaaattcttttaaaagtggtagtaggccttccctactctatgccacttcccattgtgttgcacacagtttgtttagcagaattttattggcagactccatgatttaaactcccttgtttaattcaatttaaataaaatgttgtttaatgcagtgaaatttgtgtgtataacttattcagcattagtcttaaaagtatagacattttgtgataggatagaatgcatccttgaattattgtaaaaacatactgataactgagatgagtagggaaacaaaaatgtttttacagtaaagtgaaatttagaattttgttttaataatttcattgctgctacttttgtaactattggcttgctaagtttacttttctattgctggagttataatagattttgaaaaaatcaaacttggcactgttctacccctccccccaagcttgctgagttcaatatatatatatatatatatatatatatatatatatatatatatatatatatatagtccccttttaggggactatatggatagaaaaacatgaggtggtaggtggtataattgaaatgtagatcataatctgtttgttttaccaaattagctaggggttctgaggatacattttgaatatttgtgtatatttagcattttatctctttgttagaaatctttcagtgtgacttgtttttaataggatgtgtcttgaattgtgagccaatcactcttgaaaattaagccctttaaacacactggtcagtcccacagagggacgcctacaggtttattagcactgcttggcctgaaagcacagcatacccttttaggttgcacagcaacagactcctagcaaccgtaatagattgaatttctaagagtgactgggccggatgtaataataaagcaagaggtacaaacagttgtcatggttttcttttcacagccagctagtttgatttagggaagcttagcttttcaaaaatggatgggcaaacttctaagaaaactattactgtttgtacataggacttttggtattaccataataatagtgatgccaaaatttaagagtcatggattaataatatgcccataataaaacaaaagttacaagaattattatctaaagttttcaggaggaagtatttaaaaggatattatcgtaaacttatattacagtcagagccagataatcctaataccccttttaaaaataaaaacatcttgatatttatgctttctttctttttgacattctatttttctattgctgcagtttcctggagttttatgtttgatgtaattgaacatttatctaaaactgatcattttacaaatttcaaaacatttaaaaaaaagaaccagcttatttgaactgttttgaagttgtaaaccaattgaagcagagaatttattaactaaacaataaagaacttaatcttttgcagtgataagaaaagcactgtggtttttctaaggttgtaatgtcctctaacttctcagcattctttttcgccattagtgtgtttactaatgttgttgtgaaaaggaacttaattcaaatactttcacagtctgaagaaggatgcttccatcaaagaaagagactcctgtagctgttggagttgagagtagaactacagcctttgacagcaataagctgtaaatatacacacatgctaatacccctgatttgttcatcttttgtgtcagcatttggaaaagattgttaaagtggcagttgtagtaaagactagcaattacagtaaagagcagaaattaggtatttgtgacccattatatttcattaaaagacttccttattaaaatggcactgcttactctgattacttgacagctgcccaaaacagattagaaaatacacagtttcagcaaaaggtaaaaatcaacctcttaagcaagcttatagcttagaataaataaatggtatgggagaagccatttttaaacaattttgcttctgggtgaaatgtttatcagtgactaagtagtatgctcccttagcattcatgtagaaagtacttaccaatgagattttcccactgagatgtcttagaatgctcatctatgatcacactagctttctactagacaatatacctcaaggaatatagacggagggggagcagcatagcatcaatcaagtaagcatttgttctgcccctgcccccagcactgctcaaactttggaagctgtattttttgatgtaatatcactaggttatttatgtaatattctaagtgttctttatttcgtgatagtttaccccagtgagttcaaaacttggaactttaggcaccccttcacaataatgaattgtttacattttctagatgaaattttcatcttctttggctcttgttaacttcagtagttttttgcttgctttggaaagcatatagtatacctaccatttctgtctgtctgtctgtctgtctatctatctatctatctatctatttatttttgtctgtcttctacaccatcaagtatcggacaatccctgtatagaagattctgtgaataccaaatcatacttcactgttgaagacacaaacacaggctcagtatgaaattaatgtacacaaaacatacttgtcagaatttacaacatgttgtatgtgtatggaactgtatcaatttccacgaaaattgaaactaggctgtgtgagacactcatgattaattccagttatgcacaagttgggttttcagcttaataaatatctggcccaagttggaagagttttgttaccttgtagaattcaaagagaaggaagtgaagcctagctttgttttgttttctttataagaaattttaacttaagcctcagtttgttgtttggtagctaattgcttaaataaacattcctttgattccaggtttttaaaatgtgaaaatggggatgctataaaatgaaatggggagggctataaaatgaaaagataagtaaaagataacatgaactaagggtagaaagaacttatgtccatccagttaatttgaaaattgataatattcttttttaatatattttttctagcataattttattttatgtttatgggtgttttgcctgcatgtaggtttgtgcaccatgtgcttgcagtgcctatgaaagccagaagaaggtgttggatccctgcaacaggagttacagatgcttgtgagcctctcggtgtgtgcttggaaacaaatatgatcctctggaatagcttccagtgctgttaaccactgagccatctttccagctctgatattgacatttgcattgtgtctcattactgtgctgtgaaggaagtttgagagcagtagctgaaaataataccacagagctagacttcataaaatacattgttttcaaagaggtgtgcgatatatcaactcatttcaatactggttaatattgagaaaattgtgtataaagtgactgctcttatctataccttgggaccatattttaaaaaattatgagaactgttaagtgtatgctaccatgttaaatgttaacttatccacaattttgatagaatttcaaaggatggagcattcttttgatattttggtgaatatatgtacaatgaggcctctctctatatacatacatacatacatgcatacatacatatgcaaagagcttctctgtaacatttttttccacatgaaaactaagttaatatgtgtctaaattcactagttttagcatcttgagctaagagaattgacagtgatcagaatctctgttaagaattaaagcagcattggaggcatagtaaatggatcgattacctttgctactgtttggtctagtttaagactattcaactttttttcatagttaatttattaaaaattatttatattttgctatattctattgttaatgtcatattctgttgtagatgtgatgaaggtatttgatttaatgagaaggtagtgtattcaaaagaatataaatggcttgaaatattgtagacagtgactatctgatttcatatttttgaggaaggtaattcttgcctatgtttaaggaaaagcaaagatacgggatttgcttaacaactgagaggaatacatggataaagtgatactctggagccaggtcaagcaacacttaatgttaggaagtactgtctacagtacaaccactagccattatttgtgttttttgtaaaccacaagtaatcttttctcaagaacaatttgtatatttatattgttgaactctttaatgacatttaaagaatgaagcattgttaagaatactaaatttaggatgttttaaaacttttcatgtaacatattttgataatatctcttccccaactcctcctagacccattctacccccttacccatccaacttatgtttgtctgtgtgctctctctctttcaaaataccagaagaaaaagcacacacatacatgcccacacacattaaaacaaaaacatggtgttcttgggttggccttccatggagggtgggatatactcagtgacactccattggagcaaactgattttcttttcctagcaggtatcagtggcaagtagcctcttggttagacatgggaatttgtgtccacttccccttctcagtgctagaactttgcctggtttgaacctgtataggacttgtgcatgttatcacagtctctgtgagttcccgtgtttttcaatcctgatgtatcttgaagatactgttttcttggagttgtccactagctctggctcttatgcatggattcccaagccttgagagtaggagtttgaaacagacatcacatttagggctgagtgctccaaagtcttgcactctcataaaactactgctaggcattgtgtttctggagtgattttaccattgtttcctataatgtctttctgaagattgaccacataaagtgattttaattcaaaagatgtcttctctacctacttgttaccatactaagtgcataacttaattacttttctattgaaggccattagtattgtgtgggtatagaagaattgaaaaaagaaaaagaaaaaagaaagattctggatttgagtagagaaattttaagggagaagttaataccatgaattgtatcttacagttgtgagggttattcatactgtagatgtagagccaagtatgtaaagagtttgcagagttcatttggaataatgaaacagatgaaatagacaagaaaaaggcatagaatttacagcttggttataacataaccagccagtgtacactgaagaaaggatccaatgtgaagatgaaagtggtctttactgagatgaatttagcagatctatatagaatagattatagacattaagcataaagacctgtaaaccaggactttggcttttaattaagaaagaccttgcttgagctctgttcttctaatacattaagttcctgggtgatacagataaatgctactcagaggagttgtatggcaaaatgtgaagacaggtgaaccaccagctatatgtaaaactactggcacatgacagtgaattatattgccagtgtagcatttgattagtactattacaagtaccataggagtcatcagttgtgttgtcataaagatagaggctgaagatacattatgtaaaaaggatgtaggaaccactgccaatccctacatcagtggctctcaacctgtgggtcccaaactcttgggaaaacctgcaactccaaacatatttacattatgatttaataacagtagcaaaattacagttaagaaatagcaatgaaaatgattttaaggctggggttcactgcaacatgaggaagtgtattagagggttgcattacgaggaagcttgagaactactgccaaaggtcacaaaccatattccttcataattagctatttaccaagaagcagacggaacatgctttactactgtaactttacctgttcttttgtagaatagtggcaaaaggaggaatgactcatcatcctgtccccagtttgtagttcacctcctttcccaatgtccccggtgctttattgtactttgcccacatgtatacttcactataaccttgctttgtcctttgtaagctctcttcccaacaattcctggtgctaaagtctagtatgtctgcatttctgtctgggaagtccatgacttcactctgggatcctcaggatctgcttgagtagagttttaaaactcagcatgaccctgaactgaacaaacttcttgtcttatgagcttagacctggacagagtcagagcctccatccagaagtgcaaagaggggctggagaaatggcccattggttaggatcacttgctgcttcacctgaggacctggtttcacttttttgagaccattaataattttagtttcagaggatctgactgctttctggcctgtctgtacaactgcatacacgtgctgcacaggcacccatgaaggcaaagtaccccaatctcacacacacacacacacacacacacacacacacacacacacacacacacacacacacacacacgtacaagaattaggaacaatagcttctcttaactgctctcaagatggtgttggaagtgaccattggacatggcttcttactgtatttgtgaagtaccctaagaatgaaaaagctaaaagacaattaggttctctggtgacttgtaaagcagttgagaaagacagtatttgggtgcagtaagaatgggaaataaccaggcattgcttatcaccatgtttgctagaatctagtcactttctcacacattgctaaccaccttaccagagatgatggagttgtcctacatacaacaagagatcaccctagagtttagggcaccagggagggcattggcacgattagtgcattgtatatgaggatcataccatacatgttctttttaattgaatcattggatatgaacaggctctcaacgaagaaactaagtttaatattcaaatgacgagtggtaaaggcacacttgtatcggtgaactagtgtggtagctgaggaacttgcaatgccttaaaagatctgagtacctcagtgtcgtgggaaacagaactagctgttccaagcagaaattttgtttatagcctatttggagaggagggattggcaaagataaactgcctgttatttagcctgaactttgatgatcacaaggttgatgtgaaggatatttggagaaaataattagaattaaaggaatagttagaaggttaaaataatacatatgtagttataggcctgtattactagtaattatgttggttagaattcattgtgaaatatgtagtctcttcatatatacaataaacttcatttcagaaaacagtcacagtgtaaaacgcatatctgataatagagtttaaattgtccagttctttttgagaaagagctcaataattagtacagattatttaattttgctgaatctgatttgtaatcctctagacacacacaaacacctgtgattattttgggatccctgtctttagttagtcctaaacacatgtgtttagatttttctgcctgttcatatagactcagctgtgcctgtttcctttgttatttttccaagtttaatggaccaatataaaaatttatggcaactgtcacttaatgccatttgtacctttgaggaaaatgaaaacaaaactaaaccatgctaggaaactgtgttgctatttatagttgattctaagatacatactatgctaaactggcctgtgatatcatggaacaaattcaggccagcaaaaatagtctgaagaggtgtcgtcgctgtaagtagacagtattagaaataaagatcagtggtttctttctttttcttttttcttttttttgctatcttatttttttgaatgtacttatttttttttatttgaattagaaacaagattgttttacatgttaatcccagttcccattccctcccctcctgccttacatacccccctaactaacacaactaacaccctacctatcacatatcctttctgctcctcagggagggtgaggccttccgtagggtgtcataagagtctaccatatactttgggatagggcctaggcccacccccgtgtgtcttggctcagagagtagattgggctcccaaagtccacgcctatgctagggataagtactgaactactacaggaggtcctgtggatttccgaggtttcctcactgaaacccatgttccttgggtctggatcagtcccatgatggtatctcagctatccgtctggggaccaagagctccccgatgtccaggtcagctgtttctgtgggtttcaccagcctggtctggacccccttgcctatcactcattcttctctgcaactggattccagttcagtttagtgattagttgttggtgtcggcttctaattccaccagttgctggatgagggcaattgggtggcatataagtcagtcatcaatctcattatcaggggagggcattcaatgtagcctctcctctgttgcttagattgttagctggggtcatctgtgtagatctccagacatttccctagtgcctgatttctctgtaatcctaaaatgtctccctctattatggtatctccattcttgttatcttctattcttcccctgacacaacctttctgcttccttatgtcctctgcacccctcctcttcttccctcattctcatagcttcctcccccctcttcctgtgctctcaattttctcaggggatcttgacccttcccctttctccagggacaatgtttgtctcttttcgggtcctccttgtttcctagtctctggcagtgtggattgtaggctggtaatcctttacactatgtctaaaatccgcatatgagtgagtacataccatgtttgttttttgtgattggattaccttgctcagaatggtttcttctagttccatccattttcctgcaaatttcaagattccattgtttttttctgctgagtagtactccattgtgtaaatgtaccacattttctctatccattctttggttgaggggcatctaggctgcctccagtttctggctattacaaatagtgctgctatgaacatcgttgaacagatgtccttgttgtatgaaagacacttaagaaagtgttcaacatctgtagccatcagggaaatgcaaatcaagatcagtggtttcataataatctttcttatttttctaccatgaaccagaaatttcctcaaaaggaaaatctgaagtatcatatacacacctttaatcctaaccctcagaaggcagtggcaggataatctttgagtctgaggccaacctagtctacatagtaagaacctatctcaaaactttttttcctataaaattgcatagtgagtgtattttactgatgttttcagctttatgacctacctgttcatgtctgctttgcttcctcatttctaaaaaaatatttattttatttgagctagtacatagtatctgttaatcttttctcatttttatttctttaaatagaaagtagaatgattttcagagtttgttctttcttcttcacattgtgaagtacacatttaagatatctttttatttcctcacttttttgataattaaaacattttttattctttgaatttttgttcattaaaacatattcctgtaaaaatcaaagccagtatcctttttggcttaaaaagaaattaaaaaatagaggtttagttatacaaagggtacttttaaataattgagacatacagtagtatttatcctgaaatacagtaatttaaaataatcaacagttttaagacactttaaagaattttgtgataatctaattgtttttaaatatgtttgagctcttggtatttcaggcattttatgataaagaataccttgagtttggctggttgaaaaactaggggtaacttgataacatgtcctctgttacccatgaataacatagagatacacaaagagtggaatacttcagtctgtcatgtataggatctcaggtctgaaatttttgtaagcgtttatttagaattttggaatatgcttttcttggtggttgacagtgaatatggtgaggggctttattctttcacaactctgtgtactagagacaccgattgtgttatgtaattcttttaaatgcttcaggaaacctgtttgtccgtggtgctatggaaactataagagaacttctctctgctgtctatcacctagcccctctgtcacctccagctgtctcaggtaggaataaaggcatgctgtattgaaaagtcatatagctatcattcagtttataggaaatgagaaagcatccacaccactgtatgtgagataatcaagtacttttcaaacttagagcagtttaacgagaccaaagaaaatgcagtcttttcgcattgatttggtacccatgtgtcatcctccataatgtctgaattgggtatcctaaactggtagccaaataactatacatacactctacatttctatactagttaaattaccagaggtcatgcacatatccaaatctacttaaaggtagaaaaatagcaatcactttctgaaattcagacaatgatgtgattacacttcaaccagtggatattgactatttggtgagtaattggctaacatgtttctgataatattataattcttccactcagtaatgggttggttactacagttcccaaatgtgaacctttgctttcattgcaaatagttctttaaacagaacctttcctttggcattcagaaacatgaaacaagctgggatggatgtgtggtggttgggggataggcttggtgtctgagcacttacaagttgttcgttattggtctctgagattgtgtttgcagtcagctattttcttacctttccaaattgttgaaattcaattgtccattaaagttggtaaaacattattttgccatttcttttttaaaatgaaacctaaacaattaaatttgatattttaaagtaattatatggtttaccttttagtaggtgatctaatctcataattaaatgtgtcttaactgttttaaatgtggttcacatttcccctgtggtactggttattgaacccaggacctcatgcatactaggccaatgctctgagctatactctgagcaaattctctgacctatatgcttacttttagtgtgatgtggatcagacctagtgtctctcatgggctaagcaagtgacctttctctgaggtaccctgccagttcaatttgtctttaaaagctaaattttttttaagtttatttcatagtcctatgagcacctggacagtgagtgcctcagacctgcctgcatccaccttgagagcctttatatatttctaatggaagatgtgatgataaggtagaatctatcaaagttctgggttcttcagcctttcttaccaaggaaaatcttcactttctatgggaaaataaatttattttatttctatgggctattaattaggagacaaagccaaagagaaataagaactatctcctcatctcagagctaaagaggaacccaaactatacaccactccccgtgtggtgtatgtgtgtgtgtgtctgagtgagtgtgagagagggagggagggaggaagggaggagagggagaggagggagagagagagagagagagagagaggagagagaggggagagagaggagagaggagagagagagaggagagagaggagagagagagagagagagagagagagagagagagagagagagagagaaagggagtgtgggagagaggagagactaacagaggagagagagtgtgtgagagaggagagagcatatgagtgagtgtgtgtgcttgtgtgtatctgagaggggaggaggagagagggagagagggagtgagagagggggcggggagacagaattaaagatagagccatacagagagctatacagagacaggagaagagctttgtctctgcttccccaatactggaattgctgggattacagttgtgtattctgatactatagcctccatttcaaacttgtgtttctgtaaatgtcctccagaggtttcgccaaaaatgccccaatgcatttctcaaaattttatcatggatataaggttacagtaaggttttaagaatggtgattaattttatgtttaagctctcacaacatgatttgaaacataactatgcatttatgtgtaggagttataatttaagagctataattttatcaaagtatatttaaagtaacagctctttctttcagatagttccctaggaaatgttgcaattttcttgtatttttcaaaccattaaagttgttaatcaaatcaatcttatactcattttacttactgatttccataattgaggatatctgactgtagacattgcagatctaataattatacaagtttatgcaaatttgtggaaagggtcttcaaaatatactgttaaaactggttgcagtgtattttttagaaataagataaaggaagtaaaccagtgtatgtactggtagaacctttccttaggaaagtagtggaggaagcatccttcagccatcccaagggaagcagcagagaacaatttcacatgtgtttctgtttacaccactttttcttttactctgatatttagacctttaggtttggtagcattattctcctctgctgtatgtgaaatgagtaaggttattggaaagggagaaaaaggggaatggaggaaaggaagcaagtttgaatataggtcagcaattataatgtagctcatttacacagtaggccataacttacaaggttttttttttttccgtgtgtgtgtgtgtgtgtgtgtgtgtgtgtgtgtgtgtgtgtgtgtgtatgtgctcgcacttgtagagtatttgtaagaacttgcctggttggtcagtttatgtgtagccattgtctccttgatgtaaatggggaagcattgacaagtgaagaaacacaatttaagtattgcagttcttatgtcgatggtaagctgtgaactgtgatatgactgaagtattctacccaccatgtcagtaactttcaaattaaagaaattctgaaggaactacattcagggggattgttggaagtcaaactggtctgcagagcagatttacatttgtttctttttacttgggaccctgagttacaaagcttcacaactatcacagctgtatgtggttggctgtaaattatgaattgtgctctctctgtctttggtataagtgatgatcaattttgcatgtacttcttttcttactggtcattgtggatctagaaataagaattcgacttttgatgtttttccttttctttcttttttttaatgagtatttcctgatttcacacacactactaggaataaaaatggttgaaaaaaattgggccctgtagtagtttgtctttaagatactagtttaaaaaatacaaatagaaaaagtttgttaaacacataagactcccttagtgaatatataatgcatgaagtaaaaagtgacattagtaagcattgtcattctttatagtatttgaagtgttacttggatttgtagcaccaaccctggaagctaaacatacttggatttttcaaggtaatttttatgagctgcggtctgtttatagagtaaaaatgttgggttatggtaatttcagaaatggtagtagaattgctaggaatgattccttcttcacatcaaagaattgtagagcctttcatatgcaagtttcaagttgggtgtttcatgatacacaaatatgcatttaattcttactgtattgtaaaaatctatgaagtttcttatctacaaacacaggaagaagtcctaaaatcagtgtttcttcaaaaccatcatgaaatttagaaagagttagttgtaaaatacacaaattcaagtgaaacatagttgtttagactctaattccattttttagacttaattcattctacaaattgaatgtgtgtggagtttatgttctaagaaggcagtggtttctttttctgacactaactagttaatgagctttagttcagcatgctaagtcaaacacccctaggtgatacaattcagtggttttgttctagtctattctggacatgggacaattgggagggccccccaaaatgacagcaaaatgctcctgataggagtgagtaccacaggcatggctccttaatgtgcataactcaaatttctgttccaagttatttgcatttcttttcttttattgctttgatcttttttttttctgaaatcaatatagtgtcaaaatgctatatgacatatagagaaatagaattgacttccttgaaaatcagacctatatagagcaatcttaagttacagagtgggagattttatttggtcataaataagaccctccttaaaaggtctctaagctctggagtaggcagactggtgtttcagatattttcactatgtctttaaggctaaaaggattagttattcaactaaataatatgtgtattctttaactctctgccagccttatggctcttgttataatcatgatgccaattacttggaaaaatgatgcttgtattctttttgtgcttatgactaaaaatgatacatgcaatttatggagatgtgtaaattgttttcttaggtgttgtgttaggtagggttttttttttcttctgttgttgttgctgtgaagagacaccattaatactgcaactcttagaaagaaaacatttaattgaggtggtggcttactgtttcagaggttcagtccattatcatgacggagaacatgacagcatgaaagcaaacatggagctggctatgtcttgaccagaaggcaacaggaagtcaactgactgtcacacactgaaggaagctttagaaaaagagacctcaaagcctacccccacagtgacacacttcctccaacaaggccacacctcctaatagtgccacttcctttgggggccattttctatcaaaccaccacaggtatattaatattaaaaactgagaatatttgagattattgtactaagttcctttattatatataagaatcttcatgatagggctggagagatgctgctctcacagaagacccaagttcagttccagcacccacatgtcagctctcaactgctggtaactcctattccagggatcaagtccctctcttggcctcgttggcaccaggtacacatgtggtgcacttacatctatgcaaacattcacacacataaaaaactagaagcttttaaaaatccatagtattgcatgtatttaaaaaaaatagttgatgaacaatatgtaagggaccaaaaattagtcaaggatgaggcagaagcaatcctcccaacaactatcttagattattttgcatttcataacattgattttgaacagatactgtgtgtcagaccctgaagtaagtacctcattaaactcttataatcttcacaataaccctccaaatgatacaggttcaatgagattttagcttctttgctattcagttttcatattgaaaatggtctgaatccccttgtttccctcagttccagataagttaatctggttgttaaacctgaagtaaataaggtgagactatttattggtctttgcccagaagcaccaatatgcattatgggttatcttaggactatggtgatgttgaatattgctttctaaaattcatcaaattcagtcatgagacatctgggtaaagctttagaacaagttacaatcttgttcatcttgtcatttttaagttgagaagattggtcctagaaaatgctaggtaaatggctaaacttaaatagcatgttaagatgttaagtattttactgagttaagcacatggtgaagtaaaactcaacaacatttgtgctttaagcctgtattatctatattatgttaactcagtggtgggtttgccaccccagtgccagtggaaggaagggtatcagtatgtatgtcttgaattgattggcacagttggtgatctttagtagggaaggcatatacttagatatttataaaggaagatttccttctaatttgtgtttatatgtggaactctgtgcttttctatgtgtgtttggcaagcatgtttctggtcatgaaatcccctaagaaagtggagcccagagaaaagagcttaactctagtagagttggaaagccatgatttgtctgttgttattattttgcctgcatctgaatctttactaaaagattgcttattttaatttatttactaaaaaatatttattgcatgctatgcagtgggctagaaataataatattaaacaagaaagcatggtccctagttcaactgatatgctttaccattatagatatgacagttcttggaaagtaccacatgttgcagtatctttgctcccaaatgacctgaaaaccactcacctttccccactattgtgacaaccaaagtgggtctaagtatttacaaaagatctctgctcagcattgtgtagtggcatgaatgatgaatactggtttcgtcttggtgcttgtttattctctatccatcttaactgattttaagagtttattttattaggatcctggcttactgtaaagcatcaagaaagtataaatttacaaaggagaaaatgaaaaagaatgagaataagcctcgtgcccagattagtgcatgtcttcaaggtctcttaaatgcatgtgtgctcccactgctactcctggatgtacctctgcaaagtgaaatgtgttcttcatgacagtcgggtcacaaagtttggtttaattataaaatgatattaaatcatctatcacatgaaatctagaatgctgatgtaatacgtgtgttttctttttaactatacatttaaattaccaagtttttattcttagaactgaactaataacattaccatccatattttgagttagttgtctggagtataaaacaggtgtccacccctatggtatcttttgtttgttagttcaacaacaatataccactttaaaaaagcttgactgtagcatgattaatataagacacagagacagatattggggttcaaattccaagctgaacttcagaaaagcaaagcagctggtcactagctctcacctctagctcaggctgaaagggctgatccacacacacaagctctttatcaagtctcagactgctttctcccctaagtgtggctggagaatgaatgcatcttattgaagaccctgcttctgtcttttatacccccctagtgctgggattcaaggtgtgtgactggcttctatggcttgtggctgactttgctttctgaatcctcaggcaagctttagtaaaccataaataatatatcaatgcacatgacattcatactgaaaaatttttccatgacaatgaattaaattttatatccttttcacattgtatgaatatatcagttgaatgaagcaatttctacacataatagatggtatcctatataattttggtactaattattaattgtatgccaagtttatgtaactaattaattctttgataagaattgttaataatagaattactttgtaaaaggtaagtactgtgggaatgtttttaccaattgaaaaataactcttgcaaacttatgtcactttttactatccgtaattatactttaatgttgtatttctttgctggttctctgatactaggtgtgaccaatcttttaattaaaatttccatatcacttgaaaaatatcatcatggacttgtatttctttgacaactaataacaactttatagggtatactatattttttgtgacttgaatgggtctctccaagttaaaagtgtgtatcatctcagaatgggatagttaggagaatgtgttgtaataaagtgagtttggacccttgctgccttgtttctcaccatcctgcctttctgctttctgccttggggatgaactgggaagagggctagagcctgtggggaacattttatatttatccctctttaccttggacttccttgttcccagaaccatcagaagtgattttttaaaattacaagaagtagtcaattaacttagtgtgtgtgttgagtgtgtgcacacacatgcatggaccatcatgcagatgtacatgtgaaaggacaacctgcaggagttggagtcagcgcttccttcataagtgggtcccaggactggcaggctatgtggcaggtgcctttcttctttgagctattcacaggccagaaatatttctttttataaaccacccagtttggaatagtctgtgatattaccagctatactaagtatttctttcattgattttacttttctgtttatataattagtacattgtctttggggtactttttctttcccctattaaatttcaagatcgcttcattatatagattcattttttacttctttgtcactgattaattacttgcaagctagaatgccattaagactgctcattttttaaaacacttaacaaaacagttgtgcctggagatgcgactcagtgatggaacctgtgctcactgtgcagaaggccctcagtttaatctcaaggacacatatatacaagaactcaaattttgctatgctcttttgtggttttgttctactgacttctttgcatgtaaattgtaaggtttttgttttttccagctggtgttctcataaacatgactattatgacttatgaaaaacatgtgggctggattgatgtatttgtgtttattgacattgttattattttgtttgagacagggtcacactctgtagcctaggctggttggaacactcattgtctagcttaagttaccatacaatgttgtttttctgccttggcctcttaagtgctaagtttacaggtacttgtcaccacacccagcaaagttagatgtataaaagagggaagaatacttaaagatatgaaaccattttacagatgtggaaggtgacacattgccataatgaagatcgattgctctgtgccttagtttcttctgtagctttttaggaacaggtaggtggccctatggcactctgagcttaggtgtgttcttttcaagctgagcctttcctagatgcagtcttgccttcagtgtctctgtcttaatgtcccagtgcttagcaaggtttctttaatgatgctagtatctttaaagagttacagatgctttgtcattaaaaaaatttttttttgctctatttgttactctctttgttcatttgaatgagggcagtgagcaataaccatgacacagcctcagtgttgtagcttgaaattttctctgtcaaataaattaggtcatttcttttgaattcagtttcactgaagttcttgggacattggcagactgcagtcaggattctttgacagaatgtaacccaattggccactagcctagatcccaatagtgtccttgttctcctctgaaactttatgagccaggccttcacagtcagcagttttgtttgtactcttgtcttcaaaactctcaccagagtggcccacttgagctctgcttatggcattctaaggcttttctccctcagagttccaaactcttctctatttcccttacaaatcatgtctggagacctaacacccacctggtcagggtagaaaccccacttgtaataatttctgccttagttactcttctgttactatgataaataccctgaaaagggtcacttaagggaggaggggtttattttagcttacagttccagagggatctggcccatcctagaatcaggacaataggctggttagtcacattgcatccacacccaggaagctgagagtgaaccagaagtggatcctataaactaagtcaacttaccgtgacccacttcagccagggaggctccacctcctaaacagcacttttcaatgttcaaacaagagcccatgtggaacattacacattcaaagcacagcattgtgattacagttttagtagatgcatgtaaaaatatagtcatgaaaaaaataacatgggtgaaatttagttggaatatcttacatttaaggcatttaatcttaacctttatttgctttttagtgtagaggacaaatatttataaggtcgattatattttaaagagtattggtggctttcccacttactagttgatatataattggatgagcaattgaagtattcttgattatctgcaataaaatttggtgaaattttagctaataacatatagttgacatgagataattatgataatttattgtaagaatggagcctatctggatttattgatcttagtgtgatctcaggtaaataatactgccatttccttggcttaattgtttgtaccacattcctatagaatagggcacatataattttgcctagtggataaatgaagagctgatgcatggagagattaattgacttctccaaggttgttcaacttatgagtgattcatcaagtttcacttaaaattaagtgtccagctgaacctacgttgaccctccctgtgagaaggaacagagcatagaatcttactgtagtttctggtcttcattcagctttacccattccagagtttcctatatttgattccatctgatcacatgaacatttgccttaatgttgcagtaattggttacattgatggtattcagagctcttgcaaagtccttttcttttccatttgagctttaacaaatatgcaaagaatatttcacaaacagaacatagaattaaagctgctctgggtctagatgtaatcttcaggaggacctggcagctttgatgcttgtgtttttagttgactggaatcttgtaacaaatttcattatccttctagaaagaccaggtggaaaattggtcataccgaaagggagaggcttgaaaagtatctggagagtgaagccaagctatcctagtctcttagatttgcctgtgtctcatctgcaagtaggaagcagtcatatgatcacttgtaagatagaaggcctctcaagcactgccccaatagtggaactatggaatagaaaatgagaaatattctgagccagttagtcttggtgtagtttgttgtacaaagggaaaaatatccaacaacatttttgaacaggtgttgaatttttttgtcctccttggatagttttgatcttaatgtggcttatataagtgtaatgttgaggagaaataatagtgatgaataattatttttcagttattttttatttgccttcaatccacatgtttgagtaaagttgttgagtctgaagaaaatcctgttctgtattgagtctcttcagagtaatctgggtgggatagctgcacgtggacaggcttaaaaggatgccttccctctaggttctccattgtctcatgtagggctgtctactatgtttaggtctgtttccttgacctcctcacttcagatttctgttttttttttttttttttttgttcctttctgtcacagttgaattggatttgccaagtaaggtaaaatggagcagcttttctttctcactgagccttttttattatttaaattttatttatttgtattttatgcatgagtgctctacatgtatacctacatgccagaagagggaatctggtactattttagatggttttgagccactatgttgtttcgggcaattgaacttgggtcttctggaagagcaaccagtgctcttacctgctgattcatctctccagcccaaaccttttctaatttacagaaaggatttgggatgctgttaatgagcaaagaccccatttattttagtaggaaaaaaagatgcagtatggaaggctttgtgtgtaggcttattcttactcccttggacaacagtggtttttctttttcttttttctttttttgtctttaacactgcaataaaatttctcccataatttttctatagataagaatcagtgacccaaactttacatcaaaatttcctaaaactgaaaggtatctttaaaatactgacatatagaactatggaggacaaaagaaaacaacaaaaatatgtgtaaacttctgaaaatcaagctacatttaggattttgatagttgacaaagctggaatgtacactgaaaaaaatgaatgctccagagaaaatgatggaacctttggaggacagtaaggtctgtggatcctaatgaaattcccatctcccctctgctccaccctagtggaatagctaaaatctggcaactgagcatgtttgaatgagggcatggagagaatgagaatatgaatgaatatgaatcttactgcctttggaactccattaaaaataacctccgtctcgatagcatagttagtattttgtctgaacttgcagctccctgggaaaatggttctgagagcttttggatagttggttgactttgagctgtgcttggagaaagaaaaagcttactttccagggcattacaatagccagcccttggcaaggtttctattgcttaaggcagtgacttcatttgctacaaaccagagcctggttaggaattttaaaggaagtgctggagaactagccaatcatagaacattagaatgctctgacgtgttgatatctaaaagtctgcttaatacataagactgtgatatttgcctaggaaagatctgaaaatgtcacttctggctgaccttgaggctctgtgtcattaggaagtgaaagcaagggctcttttataaaccttttaaagctggagttggcacttcataaagataccttcgacaaaggatggaacatacgtaactgaggcacttgagaaaatcatctgaactgtattatatctacacgagtgtcatcattaataagtcttgcttaaaaattaaagccatgaatttaaaacaaaagttagcagaaaagttggtcaccattcataggtaatagaatctgtgaaagtggtaagttagcacaatttgaaaaaaattccagatacttttggaggacaatggaaaattcatacaccagtgtattaaaatatgctatataaaatgtttggtttcaaacaaaatatttaaacttcaaagaaatagaaaatatgtcagggagtttgtcaagtatgttaaagaattcaccctttagacaagaagaagtacaaagtttaatatgctgctagagcagcaggcatgaaagtagtcaaagaactgtttgcatgtgctaattagattcaggggatgagccctgtgtgggtggggtgagccattttgctgcagtttctatccatgcacttctcatcatgcaaatgaggatggctttgtggtatgcagttaattttgatttgtcacacctttctgctttggttggactggagttttctggactctgagttatggccttgtcacaggaaataacacatacacaggaaaaaatggaacaactaaaaacaaaactgcaacagaaaactgctctttgccagtccatatttattttaatttgattgattttgatttcttgagacagggtctccctatgaatccttagttggtttgaaccttactggtcagagcaggctggactggaacttacgttgatctccctatttctgcctctgaagtgctggaattgtaggtgtggtttactatgcctagctctggcattcagatgtattatttaaaagatttgtaaagttagctgttgtaaattcagaccacaaagaacttagtgaaacatgtttaaaggaagaaaatggtgttttatcaagagtgaatacaatgatacagattttaaaaacagccacacagatgttctggaattaaaaagtaaatgtgtttgttaccagagggactcagcagtgtatagagcaggcaggagaaaccaccaacctggagacccattgagagcccgtagagaccatctagtgtgagaagaaacccatccacaaacggaaaacgcagaagaaactcaggagacaccatcacatgtaccaacataggcgtaaatagagctccagaaggagaagagaaaggcaagagtatttaaaggaataattacagaaaatttcccaagcgagccaaaatatattaatttacacattcaagaagttcagcctaatctgaatggaataaaaacaagctactaatatctagacacatttacttatatgaaaatgagtggcaggaaagccttgaaagtagcagggaaaagtgagggcccttagaatcctctgtaagattaacagctgactcacagtacttaggttgggagacattctcagcatcaaatggaaatggctgtcaaccagaagctttgggtctagccaaacactttaaaaaatagaagacatttccaaataagcaaaaactaggagagtttgtcactaagagaaatttctaaataattgtaaagagagacccaatagttgaaataaaaggtcacaagatgtcatatgaaataaaggctagttgtaaaggtgacaatagacatatgaaagaaaggtctaaaaatacatgacatgtaattttcattgtatttatctctaaactacagctaatgaatgcaaaaaatcataaaattgtgtttataataatttaataaatttgttttaacccagaaaggaataatttaggaaaagtactaactgtaatcctcagggagactactaagaaaataaatcaaagaaaatacagtaaaagagacaacacaggtatgtgaaaatatactcagaagtatttaacacagtaaaggaggatttggaattgaagttactatatgtgtatatatatatatatatatatatatatatatatatattgtcataaatgaagatagcaatactataggacatttagatttataaacctgatatataatttccctgtaatttttaaaatttttattttaaattatgtttggtatgtgtaggatacagggtatttgcagatgagtgcaggttcctgtgaatgccataagagggcgctggatcccctggagctgtagttaactggtctctgtgacatgtgggtgttgggactcaactttaggtcctgtgtaagagcagtatgtgcttttagctgctgagccatatttccagtgccctccaccctaattaagattaattaggtaacaaatttgtagggaaatggagttatttacagttttgtcaaacctggaaagtctttatttctcagcttttcctaaaacaatgtcacagttttttagaaaagatgaaaccacatccaggaaacatgcgtgttacttaccctgtcaaaactgtgaatatcttcctttgagtgaaacttcagggctctaggttctcctttctactggcagggatgtgtggagaaatttaaatctttgggtttgttgcatcattcctctcgttagtggaagctgggtactcttgtgtcttgctttggactgtctcctctcctaaggctttagcttcagcatatgtttatggtgatgtgaagatgtgaattctgtaataaataaaatgaccaggtaactgttgaagaaaaatgcttcctatggagcataacggttcatagatcagtggttagtgagatattttctcaatagatttaaaaatatgacacaaagggcatagtgactgcatccttttgtatctcccacaagccctgtaaaacaacttgagtttctccacatcctcagcagcagttgttcttttctggggttttgagtgtgcaccttagccattactcagattattaccctaatgctacaaattagcatttctcttcctttttaaggaacatagttattttaagtggcatcctacagtttttgcaaatattttgttgttttctgacccaacagtagaatattggagttaggctggagttctaaacatgctaggatggatgtgtaagactgaacatgtagatttctttgtagtttaatagctgtggtcctattatggaatctgagatagtccctgaagacatcactaggcagagagtgctgctgttttgcctatgcctttagcttccttaaatggtgctttgtttccctggaatcccttttttgcttctgttaacaagcgtccatatatgccctgtctgtgaggcttccctcagtgttatcaccgatgtatacttaagtgctctctgaacctggtgatctccatggcatttaactttctgtgtcttactgtaaatctgttttcttcataagtttcttgctctaaatatgattgtgttctcaatttttttctggggaattttggtagacttgctaccatcaggagttctctgttttgaacctctctcaattagtccagtttataggtggtatttatgatgcattgaaggtcatgattgtagccatgtagttgtctggagtatttaagttagccatttaaaatttttcaaacctttacattcattgattggccctttattatgatatgatttctagtttgtttttgactattttaagggctgaactataatgttaaatggttggaagagggtgaagaaaggaaacgtgcatttggggatagatctactgcttgttggttcatctaccttgaaatgtctttcttattctttcagagaatattttattatttctctggatctttaagccagagaaagttaatactttttattttgtcttttatttcaaagacttcattaatattgtgtatttgtgtttggggaaagccttttatttaattgatgctgagaactgaactgagtgtctttcatatgctaaagtgttccaccacgagctctctgcttagtgtgggacatcttgtgaaatcagtgttctccaggaatgtttaagggaaaagggactttgaaactgcagcagcacttccatggcttgtccttgacaagggattgtctctgagattccctctcctgacttgaagattaagtagaaaaatcagataaatattacaaaaatgaaacatacattcccactagcattttaaagtgtaaatgaactattttgattgggaccaaccaccttttcttatacgttagttccagaaagacatacttataagaagtctagttttctgctttgtttcttgaatctatacaaagaaggtaagaattaataaagcaggattcccaatgtttaggagcaaataatactgttctgcctgaacataaatgtgaccatttgggatcagaagtgaaatgcaaactgaaaaaaagtctgtaagctttgaatttccttgtggcaggtcagtgtggttagagaggaagcggtgggtgtgagttcacacagcatgctgggtagaatcaaccactattcctctttctgtttatgtgtatgcatttctttggttcatttatctagtccaatgtatgtgttttaggtatttgttatcagtcattaggtccctggatttgaaatgtgtttttaataattctcagatctttctggtcagtattatggaggaattagagaacctaacagttcttacatcatcaagcagggggctttgtagcagctaacaatttaaagaggggaaagatgaaagcctttcctagcccaagtccagtcttctcccagtttgctttggaattggggaattagttgtgtgtggggatcctgtgtactaaagtgtaagaaaagtatttgcccacccctgagacccataaattggcctggactttggtctgttgaattgaaagcattgccttttgccaacaggaagatttttggatggagtattcatagagctgatttttctctattcctttttctttttaaaaaatgttttggtttttgtttgttgttttatcaggtatagcctccaaacccgtataattggtatgaaagcataaatcttgattctgtatttaacttattttgatcactggaggagtgttcataacagtgataaaacctgacatgtcagatcggcaggttagctcagctgccaagcccaataccctaagtttgatatttggaacctatgtcatagaaggagagagcagactactgcatgctgtcctctaacttcccttcacatgcatagtgttgtacttttatcctgtttctctgataaagcaccttgactgaaagcaatttaggggaggaaataatttctttggcttacacttctagggcacagtccatcaaggagggaagtcagagcaggcactcaagctaggaacttgcagcagaagccatggaggagtgctacttgttggttggctctttggttctctggctcatgtttagctatctagcttatgctgttcaggcccacctgtctggggtgggctgggcttcctacatcagttaaaattaagacagttcactagagacatgcctactggccggtttgaatcaattcctcaatcaaggctttcttagatgactttgtgtcaaatagacaattaaaaaaaaaaaaaacaaaaaacaaggacatggacatacacacatacatgcacagtaaataggtaaatgtaaaccaatgccatatataactaaggaaaattataacagaaatatattgaaattattattacattttacatggtaacaatgaggtaattacatacatacatgtatatgtaagctctttgtgtcaccaccagggtactgttatttagattttatagattggaacattgaattaagaaatctgatgacatgcctcaggtcatttaaaggtggtgaagtgtggatttgaactgtggactgtttatcactgaagaccaaccttttaaatactattttacaattttacacattaatatccggtgatttagtattcttggcttgctttcaaaaccttccctcttcctgtcaattcaagagataacattcaataacttgacaacagtgacctttctaaacaaatatagagtgttacagaaccagatggcccaagattatattttatttttctggctcaaaataaattgcctgttctctgcttgataaagtccaaaagaaaaaaaaaaaagatgcttctgtgtcccaggacctcatcaggcctcatggccagccagtgccctttatcatgagccagacagaagcacagagcccatgtcttaacaccacagtttgagagtctaacgaaagggcaagaagcaggctttacgacatgcatttattgtggcctttagtaatcattatggatttagtagaaaggtttgaggaattgacggataatcctgtggttttgttaagttgatgtgagcaaggggatggcagatttataatttaataaaccttcatgttatacatctctttttggtgtcttgtttttcttttgggattatggcaagatttttctaatgatcagcgatttcattcttacttataaaattattgtatgtgtacataatgtttacatgcatgacaggacatgtgtgtagaggtcagaggattacgccgtgggatttcttctctccttttacctttacatggcttcaggggctagaacttagctcagcaggcttgcaggacaagggcctgtagctgttcaaccattttgcaagcacaaaaacttcattcttgaccattcaaaatgtaaatgggaattttcttggcgatgttacacaaatatagttagaaaataattttacagtggacagataaggtagtctgtcatacataatcataaacacacctctgcaagcttagtcactcttagagaatttcagactggaagagatcaagttacacaagataggcatagaaattaagaattgaagaagccatacttatcattacccagaatgcatgatcaaaggacatgctggcctgcgtttaagacttgagtttgccatctgtaaggaccattgaatgtgtatgcaatgcaaatgttcaagatcttagttttgttatttgaaaataagacatggataatacttgcattgttacattgccagattattctgaggcagggttaagggcatgtgataaatttagaatgatactaccattgtagtatcatttatatagtatatggtatagtatatttatatagtatatagtatagtatatttatatagtatatagtatactactgtttatatagtagtgtttaatatgtgataagtgttccaaatgtctgttgttctaatggtcagtgaaactaagacatatgcccaactttcataagccctgcctcagaggactatcgtatctattcttttggaatgcaaacatagttattggttcttcaatacccagaacattgaatacatatatccaccaaaaagaaaaaaatatctgatggaattgaaactaaaaattaattagctctatatgctcctttgagactcattattcttttgcctgcattctatccttcctcatcactctgcatttccctcttttggtctcctttctaagtgttatgatgtattctcacttaatctgttacagacacacgcacattatagactgagatccacaaactagggagaacatgtgagttttcttctttctgagtacattctttctgagtacagatcacttcctttcatattataatttctgggtccatccattttttgcaaattttattttttatggttgaacaatattccatattttgtatatatacaatttcattatgtgtctgttggtggatgtctaggctgttacaattttattgctattttgagtagagcaggaattcataaatctctgtggtaggatatggagttgagtatatgttttctgtttttttttaaagtgtataagtgtgtgtgtgtatgttttgcctgaatgtctgatgtatgtaagtgtactacacacatgcctggtgcttgtggaggccagaagatggtgttggatccctaggacttggagttacaggcagttttaagcaccagtgtttgcacagtatttgcatttggtaatctgagcgcatcctctctaggagcagaaattgcccatgttttttaaagtaattacatttttaatttctatgtgtgtacccacaagtgcatgtgtgtgcacacttatgcacatctatacagtgtgagcttgattgaactaggatatttttagctctgggagttaaactcaggtggtcaagcttggaagtaactacctttacacattgagccccctagctaaccctgccaagtgtttctcttaataaaagtaagctaggcatggtgctacatagctgtaacatgagtattcaggaagctgagtcagggttgtgaggtcaaggccagtctagcctacttagtaagttccaggctagcttgggcaacatgatggggatttattaaaatgaaactagaaaagaagaattagtaaactgattgatccccgtatttatagaaccatcaacataatttaaagtcaaaatttacttaaattattcatgtagctccttatcttcacagatttctatttaacttcccaacttcgactgtctattctaacttacgttagttttgacactacttttttacttctaattttacaacttttctcattgtttttcctaattgttactttcaaaagggataggcctatacacactatataaacaaatgactttaaaggattgtatccctcctgctacaggctttgtcctgcattttagagagttcttggttaaagcattaagctgaattataattttggtctctacttctcagattaaaaacaaaacaaaaaactgcagtatctccctgtgataatagaatagtaatactgtaatcttaaaagtctcagaagtctcataatgaaaggtaagttttattaaatgattagttctcaaagttatatatgtatgcttttaattacttaaacaccatcactgccctgccttctctttaaatagacattgtagaagcagcatcatgtttagtaaatactaccatgcatggaaaattgtgaagacagggagactctgcaaagacatgatgtgctggggtcatgacctatacttgcagagtaattttagttagctggtcttgggggaaagatggaaacagttgatgtgtatatacaatcacaaaaatcaggtgtttgggatgcagcttagtggtagaaagcttgctcaccatggacaaggttggctcaacccttagcaccacaaagtggggtcaggcatggacatcttgaccaaagatttttgtgttttatgccaatctataatcatttaaggtaccaacaaattccaagagactaaaactgttagaaggtgggggatgaggggcatggagatataccagacctccttcacttatgtcaggttttcctcttacgaattattaggaagctccaacagcttcacagttcctcgcttcctgactgctgtcatgtttgtcgcccttgtcatcataggcaaatgccatcagagacctttaggaaagctaagtcacagtgaaggtctgggtctcatactttacgttccagttcctgtctatactggagctatattaatgtgatcctgtgatgccaatgccagcattttcacattgtgggactggaaaagcactttccacacagtaactcatctgtacccctgaagttgaccacatcacctgcacttcttaacaaaggatttctcctgggggttaaaattgatatagttgaagttagaaggatggacttccatagactgtataaacgtaagttctgtgtagcttagaatggtgatacagcccttgctgtttgccagggagatcacgtcatcattgttccaggagttttgttgaccttgaattcaaacagtgtctctggtttggaatggtgtgtcttgacatcagtaaaggtcacaacaccatccttactgcccacagctatggtctgcccattgggactacagcagatattaatactctcccctttaaagttcactgtgcattttgcattcctcatatcccaatgaaatgtcttcaactccagatgaagtgacaaagggttcagggctatttggatgccaacaaaactgactcacactatgtccgcatcttctgtagctgttatctttctccagcaagaataccctggcagtcttgtcaaggaatccctaggctgagtgaaacccacccgagttccagtccacatccactttagcactgtgggccaggaacttgtcaatctctctgtggcttcagaaaaacttcattgtccatggtgggctgcttctccttgagcaccaaggcccataaagctgggactttctggccttttacaaaaggctatagggttgctgtacgcactgcaattctgaacttcctaactagcctgtgaagcttgttgccaagtgatttaaccaagtatgtaagttgtagagttctaaaatgttagttatcttctctcattttaaggctctgattgcttgttagtgttttttgtttgcttgttttctgctgtgctcgtgtgaatgcagactagcaatcagagaactcttgaagatcttagaactctggtagcacatggctgcggttatattctcagaagttaaggtgaaatttggatgctgtcagtttccagtttgtgccattggaaagtggtttagtgtttgatttgttgtggccacttgaccctgtctttccttacctgcccatgtctagtccttgacaggactgacattccattttcacacatacatctttggatctaggatttattttgtttttatgatatactgatgaattcttgacctttacccctcttttctaacaattttgagatagaagagtacactagtgctgtacttcccagtgtgtcctctgaagctggggtagggtcctgaatagagaggtgtgattttaaaaccataattttattgagtgtcaaattttgtttacattgttgattttgtatatttgattatacctttgttaattcccttgcgattaagagtttcatgtgtttttaaattaacaagaaagtcaaaggactttttaatgtggaattataaaatattatcaattgtgttcctatgagatgagtttacaagttcttgtgaaaaaaataaacaaagtagtgtttaatcactgaacactgatcaatatcaaagaacatttatattcataattatgaataattgcctttgtgtacattgtagaatactgtgttggagagaggctatggacttacaaaatattatttagcgtgtgtgtgtgtgtgtgtgtgtgtgtgtgtgtgtgtgtgtgtgagagagagagagagagagagagagagagagagagagagagagagagagagagagagaacgaaatggagggagagggagggagggagagagggagggcaggaggcatggggaggggaagggagagagcatataagtggttctcaggtcagctttcctgagttggttctcaccttctctcctgatgtttctgttgccccactgtatgcttcaggcctgctgcctagtgagctttgaggtgattgtcctgtctctgcctcccatcttgctgttggagtgttgggattgcagatacaggcagccacacccacccagctttttacttgggttccatcggggtaacaggcttgagcagttgtgtcttcacctactgagccatttttctggtcctagttatattgtttttaagttgactctatgacttactaaaaatattttcttcatttgataccatggaaatataatttgctctttgagtctgaaaaaaaaatcaaaaccaattggttggttgtttggattctaatgtgactagactagaaatggaacattggtgagtagacttcagtatgagcacagtagttcataagtctggggattttctgcagcaattcaactttggaatctattttcctttttcttttttgctaaataaaggaacataatttctcccttgttggtcagtagtcgggctttcacttggatgctttttatataaatttatatggagatgccttgcattacggaatgaatatcacaaaaaatgccaggcagtttttctgaaatattaaatgaattaattataatacaagtgtgtagttctgattttctgctgtgtttttattttgtccttcagaatgtttaatgtttcataatgaaattatgtggggtttttttgcaaaaaagaaaacaatcaggcaaaaacatgagaaatgttttcagttgtccaaggctaatattgacttaaataggtctaggttttcatggttgacagctgcagataattagctttttcttctttaacaaagaaagcaaatggagctgcaagtagttcattgccttctctgtcatcataacaataatgtatgtatttaacttctgcagttctttaagttgattcagggctaagctgcctacattacatacaataggagtgacaagtgaaagctgtagcacatatttgtggcaaaagggtgccgtgattgacagcaaactttctctctaagtagcagcagtgctgtggagctcaaaaagggagggccagccacataattcttaaaactatagagcagatttgtgaagtgaattttggaaagggatttgtcacttggtatatttgggtgtcactcttcccttggttctaggtaaagggcacagatgtacagtattacctgactgctgtacattcagaatttcagatatgttagagttgtagctttaagattgattcaaattctagatcaatttatgattttaaaattcagtaactgaaggttttcttcatttgcagctgagttaatatttgaaggaacacaacaaaatctattcaatgaaggattttagagccataaactgactctagtgaaaatatgtagtttttgatgacctaaatagaatttctggaaagataaccatgcatggttggtggtttctttgggtcacagtagtcaagtgatcatgtccgaaaaccctcaaagctgtttatgtttttttagttgctgtgactgatgcctaggcgatgcaggtaaaaggattgctgtcgaatgaatctatgatgagtgcttttattttcctgggcactctgtgtatgtgtgagggaggcaaactggtattcctgtgtactgacaacctcactggccagtctgaaatatagcatggacccctgttctttctgttcttattatcatgattgtattttatgccagttttttgtttgttgattcaggtttttgtttgtttgtttgatttttttgtttttttagagacagggtttctctgtgtaacagctctggctggcctcgaactcacagatctacctacctctgaatctcaagtgctgggattaaaggcttatgtcaccaccctactgccagtgctgtttttcttacttctcattatggttgtctttggatgacagctttatctgttggatatctagacttaaagttattaaaaaggctattcttcttcaaagaaataacatcataaatgggtggatatttttagaaccttaggaagaagtgattataagttgacttgtgatttatttctaatagataagataaattcatattcataaaatttaaaatactttctccattgcaagtgttgtgtgaaatccaaagatttagcctttgacttttgaatgacaaatacctctgatctcctgaagaaaaccttttattcaacaaacgtttaatgttttttatttatataatccaatttctgtgggtgttttcaggaaatggggctaaattcttgctgtgttttatgaatttgggtaattctgagacatggtaggaagtgttttctagagttttggactagatagttataggaaactagataaaaatccatggatggctgtaaattttaggttgctttaattttttaaatttatagattgctatgctatttaatactgttcctttatagaataatttgattataagaaataacttccttaagaaattgggcccaccttttatttcaattttatcatgtaccttgttaatttctgtttagctctgaatgtctttgcattttcataaaagatacccgacatagtctttttatataagacttcttatttctttttttgagctaccacccatttcttgaagattatagtggagtactagttttctattcttcatgtttgctgacttctaattcagaccacataacttggctatgtgcttttcataaggcattgcttttattcaccagacattgagcaagagatacccaataacctaatttttgtttgcttcaaaaaataaaagaaggaaagaaagaaaaacattgagtgatatgcaaatggaggtagggaatactgggccaggattaggaaaatggagagtttgttcctgtttctgcttatatagctattataagcatactcttgctgttcctgttccccatttgtaaagagtatttgttgcaaaaattatttgttagtgtgcagaattgctattagtttttctgctacagactaaaatgtcaaagctttaaatttagggtatcttttaaaacagtaccatgtcttactgctcttggcatataataaaagctacttaatgtttcttatatttaaaaccttttattcttttccatagtcttccaattcaagcaagccatcttcctctttccgctgaaaacttgtcctcatgttctcttctcttcaatcctcttgctctttgctctgataagcatgtacttgtggtggttaactttttgtcccattgacacaaatgagggtcaactggtttgctcgttagcttttttgttaccctgacacaagtgagggtcaactgggaacaaggatcctcaactgataaaatgatcctatctgtaggcaagtaaattttaaccattaaaattaacaactaaaatattctactcaaaattgccctggtgtgtgtgtgtgtgtgtgtgtgtgtgtgtgtgtgtgtgtgtgtgtgtgtgtgtgtgctcacagtgaagcctggaagttgggaaaggtacaggcaaggtagtatccacaggtctcacccaactggtcaggaagcacaagatatgctcccatggcaagtttggagtttggaaagggggtgattttttatattattatataaaatttttaaaagattcccccttgccaggcatggaagcttgtgcctttaagctcagcacttggaatacagaggtaggtggatctctgaatcaggggccagtctggtctacatagagagttttaggatgaccagagctatgtagagagaatctgtatcaaacaacagcaaacaaacaccccccacccagttctactcacatttttgcatagcagaaaaacaataaaacatttattggctaggatttacctcagttaattgaatgcttgcgtaccatgcataaggcctaggtttaatccctatcctaagataaactggttataatggcatattcctataactgcagtacttgtgaggtagcggcagaaggatgagaagttcagtgtcacactcaggtatatagcaagtttgaggtcaaggtgatggacctcagaagaaacagacaacaaccaaaatttacctcatcataaacaaaacctttacttttaaaactagcttgaaatgttagcattattgagaagacttgtagatgtattccactgtttagacatcagtttgatttgaccttttgggatgccttttacatgttgatattaagatcattacatacatacccaaagtacattttgtgaaattttggataaggttcatgaatgctatttattgattgaaatactatttgttaatgttgttatggagagttgtaaatttggattaaatgaatagaaataatggatgatgttagataataaagcatgctgatgagatgaaaataatttgttgttctcaacatacttaaatatcagaattccagctttcccaagagccttgtaaacatctgtttcttacattttgtttgtcttgctgagactctgattcttccttcaggagacactttgtaccccataaatcttatagtacattcttgctttgttaaatattgaatatcatttgttagaatagcaaacatctaaaactatatgaaaattttaaattacacaaaataggatttcataaggtgcttaaatagatcctttcttcattttaccttttataagagccatggacttgaattttctctcctgtataaatttgctaatgttctctttgaagtggataccacctacataatgctataacgtgaaccagtacctgtaactaaatcattaaattcattgttgatactttgcatggctatgctttctgaggtatctcacagcatgagctgcatttgcatttctttactatatggaatgacttaaaaagccagtgaacaaattactctcctaatggcagccatgggactactaccataatgaatattctaaataaataataaagagacagaaataagaaagaaattgtaaatctcagctgggtgtcataactaaaaagtgttggatttgataaattttgataacctgttatcttataacctgttgtcttaaggaaaagtcatctgtgagagcattaagtgcattaaagtcagactgtgatgggattttgaaagacatgcatagctctttgttatatatacagtacatgcaagttctttgttacgaaagtgaatgatcacattattaattactgtagaaacaaacgtatatccttgagaatggtgagcatttagctgagctttggagcttgttttgattcatgtgacttgtaattagcatatcctaaataaccatatgttgatgatattgaaggaaaaatctattaaaacatgtcaatttaaaaacatggtaagagaccaagtgggatctcattttgtcttctattatcctagtgtgtaagcaaaaatttaccagctttgttacaagggatgtgacaaacttgatgatggaagatacaggctaagaaaaccaaaaagtaccatgaaagttggagactataatactgaatcttacttcattaattttacacatcaaaatgcaaagttttcttataatggtatccaaatcaaactaaatagaggatacaattatttcactagagaccaaaactcttactccccagtagttgattactgggtgaaactaacctatttgctgtcagtgtcacataaaaaatattcttgttcaatcaacatcttgatgcttgtccagtttctcttaatctggtggattcatcaaatatgttagagcatttttgaaaaccccaaaatataactttcaaagctcaattttactttccttagcaattaaacttgaaatagacaagctgaaatcatgataaaatatatcattaagttctttcactcttgtataccttacatgaggcaggatttcacagaatctctgaactaactccttacctccctaggtaggttggcctagaaagaatattagggaatggggtaactttctcaaactgtacttttttttttttttaaattgaggacttcctttttttgctgatactcgagaatatttcagatttcatgtgataatttcctaacccactcttggaatcagccatctctcccaggagacctggttccttttactgaaaacaaatactggaagcaaaaaacctgatgttagatgtaattgcagctctttaaatctaaatgttgagctgttgttacgggtaatcctaaattaggccattgtaataattaaattctcctgaaatgtaaaatttgccttacttaattaagtgaaataatagtaagattttaaatgaaaaagtctcagaaattttattacatcttccttttagtttttaaatgtgagtttatttatacatctttttgtgtatgtgttcttgaacataaaatctgaggtaaaaaactcaaaacatagtaatttgaaacatattgaaagtaactctaagctattgaatagactttatactctattagggaaattagaaggcatggactctggaaaaatatattatctgtgggataatattttatgtcacttattttaagtttcatattcaacagaggttagagaatattttactgaggagaggggaaaatgattaaaaagagagaaagaataacctttcagcattttttctcttttttatttgtttatttgaattagaaacaagtggttttacatgtcactcctagttccctctccctcctatcttcccttactaatcccccccccaactaaacccctacctatcacaaatcctttctgctcctcagggaggctgaggccttccatagggggtcttcagagtctgtcatatcctttggattaagtcctagaaccatccccatgtgtcttggatcagggagtatccctctatgtggaatgggctcccaaagtccacacctatgctagggataagtactgatctactacaggaggccccatggatttccgaggtctcctcactgacacccagttcctggggtctggatcagtcccatgctggtatcccagctatcagtctggggatgaagagctccctgttgttcaggtcagctgtttctgtggctttcaccagcctgttgtggacccctttgctcatcactggtccttctctgcaactggattccagttcagttcagtgattagctgtgggtgtctgcttctacttccaccagctgctggatgaaggatataggatggcatataagtcagtcatcaatctcattatcaggggagggcacttaaggtagcctctcctcttttgcttagattgttagttgatgtcatctttttagatctccaaaaatttccctagtgcctgatttctctgtaagcctaaaatgtctccctctattatggtatctccattcttgttatcttctattcttcccctgagtcaacctttctgctccctcatgtcctcctcagccctcctcttctccccttctcattctcctagctccttcccacctcccccatgctcccaatttgctcaggagatcttgtccctttcccgttctccaggggaccatgtatgtctctcttagggtcctccttgttacttagcttctctggggggtgtggattgtgggctggtgatcttttgctctatgtctaaaatcatatatgagtgagtacataccctgttttctttttgtgattgggttacctcgctcagaatggtttcttctagttccatccattttcctgcaaatttcaagattccattctttttttctgctgactagtattccattgtataaatgtaccaccctttctttacccattcttcagttgaggggcaactaggatgcttccagattctgactattacaaataatgctcctgtgaatgtagttgaacagacgtccttgtatgaatatgctttttttgggtatatgcctaagaatggaattgctggatcttgtggtagactgagtcccattttcttgaggagtccaccatattgatttccaaagtggctgtacaagtaggcactcctaccagcagtggaggagtgttccctttctccacatcctctccagcataaactgtcattggtgtttttgattttagccattctgaccaaagtaagattgtatctcagagttgttcttatttgcatttccctgatggctaaggatgttgaacactttcttatgtgtctttcagacattttagattcctctatttagaattgtgtatttagttctgtaccctatttttcaatttgaatgtttggtgttttggagactagcttcttgagtactttgtatattttggaaatcagcccccttgttggtgaatatcttttcccagtctgtgggctggctttctgtcttcctgactgtgtcctttgtcttacagaagcttctcagtttcaggaggtcccatttatcaattgttgatcacaaagtctgtgctactggtgtaatgttcaggaagttgcctcccgtaccagttaattcaagggtatttcccactttgagttctaatggggttagtgtggctggatttatgttgaggtctttgatccatttgtttggacttaagttttgtgaatggctatagacatggatctatctgtagtcttctacatgccagcatccagttatgccaacaccatttgttgaagatgccttctttatccccttatatacatttagcttctttgtcaaaaatcaggtgttcataggtgtgtgggttaatatcagggttttcaactcaattccattggtctacctgtctagttttgcgccaataccaagatataggtaactttttaggactatagctctataatagagcttgaagtcagggttggtgatgcctccagaagtttctttattgtacagggttgtttgggctatcctgggccttttgtttttccgtataatgctgagaattgttctttaaaggtctgtgaagaattgtgctcgtattttgatggggattgcattgaatctgtagattgcttttggcaagattgccatttttactatgttgagcctacctatccaagaacatgggagacctttccattttgtggtatcttctttaatttctttctttaaagattcaaaattcttacagtacaggtctttcttcatgataaatgtcttggagagatcagggataacaggaacataccttaacataataaaagcaatgtacagcaagctgacagccaatatcaaattaaacggagagaaactcaatgcaattcctctaaaattggggacaagacaaggctgtccactctttccctacttcttcaataatgtccttgaagttctagctagagcattaagacaacaaaggagatcaaggggatacaaattggaaaggaagaagtctaactttcactatttgcagatgatatgatagtctacataagtgacccgaaaaactctaccaggtaactcctactgctgatgaataccttcagcaaagtggcaggatacaagattaactaaaaaaaatcagtagctcttctatgtacagatgatatgtttgcggagaaagaaatcagagaaacatcaccctttataattgccacaaacatcataaaataccttggggtaatgctaacctttcaacatattaaaactacctggatagtattcctaactaggttttatcattctgaacattttttgtatagattctgccctctaactttagaatggagagtttattaacctgggtggttttacacagagcagataactgtttagaggctcgctagaaacctgtgtgcttgtatttgtaaccttgtaatgtctgtgaacatcgttagtatatcttctctcttactctttggcatacaccatttcatcagactgaacttgtaaagcatataagtgcaagcagtaaaattatagaacccagtgaatcaacatgaatgagagaaagaaatcattttgtaagaatcaggtattttagttgtcttgatttgtatttcaaatttctgttactttggccataaaggaccttatatgtcaaataaaagtaaaaaaaaaagtattaaatgaattgagagattgccaatactatagaaagaaatacaccagtgagggaatgaagcagcagataaaaatgaagtagcaataaatgaggcagactctagtgctgaaaggaactttgatgagcacatgggaatgcatgagagagatgcccagagagccctatcatgagaacagctgaatggtgcagagtatcagggtgttgagagaagaaaagaggtatatgtgtgtagagactggacaaggatcaggggacctgactatgtcatttgtgattgcacataaatcttgaagacagtgcacctaaaatatagaacagtggcttttagcaaacttgaattttgtgccagggtgtgtcaacagtgtgcagtgttgtcttcttcccagtgtattaggctctttaatgcttacatcaactcttgaggagtggctcttaactattacagatgtacatcaaagaacaggcacatcaggttggagagcatgttgccaagctcatctgaacaaattaaagataaaaccaggataccatgtttagtttcagagtagtttgtcagtcaggacagagaatatcaactagctaagcataggtgcagactcttggcgtctggggcaacccttaatagtgttgagttcctgtatctagttgtttaaggggaaagtttattatagtgtctgttaggtttagataacatatatttagttgaaaatttgcattttgaacatcaactgtgtctcctgaggtgatagctgatggagaagcatgccggtgaggctatttaacactcatttaaaacagggtcctttgtccagatcctgtgagtgattttttggactctccttagactctgacaaactggttgttagaacactagtccattttgtaaagtgaaaaaggaatagcaaagatcactaaatattaagataattaaaaaaacagcatgtttacatttgcagagtaaatctcaagagcaaattaattatatgtctgtagttcttgaagttaagtaggttaagtgaggcaaaagcatgatttaatcttgctttatggctggccaaatctctaggctagccattttttccttttaataaaaatccttgtggttccttgtcttcccattagctcatagttgagagctctgttaagttgtctgtgagacagagtgtattaagctggcctgattaaaattgttcacaagagatcaagcagacaagggacttttagcataattaaaaaaggactgccagcctttaaagataagatttcagagatgtttgaaatttatatctacctgtagggaactgtgtttatgtaattagattctggtttgctcaagaagccttcttaattcatgcacggtatctgtttatggaatattatctgcttgtgcaggacatgggaaagctgcctagaggagccagatcctgaaagaaagaatgaactttcccttgaaagatcaccatgtgatacattaaagaaatcatttaccttctatgttaacctgtttatttatgaaaggaaactcagaaatcacgttcaagatagaaatggaagaaccaaagcaaattgcgtgtcctgtgtgcggaggcaaatgtgagaaaagtagaatagctttggggagctggtctcctttggttagtgggttccttagcccaagtttttatttttgtattcttatcagtttcctaactttgcattactgagctctgaaattattcagttattcccactttactatcacgtttcagaaaaagtggttatatttaacatggcttaaagctgttccttcctttgtcccttggaagccatgtcccctgctgctcacagtgcctgtatcttactccaaaggcatttccccctccctttgtgttttaaaaggcattttagtttttcttcagaatggagtcgttgtagcataaatcaaaatgttactgctataaggagacagcatttcggagtaaaattattagagtgtgactttttttggtctacttccacatacaaggcatcagattcacagtaagtgagtccattgtgagaacaccccttaggaaggcctttcctgctgtggggatacagaacacttgtgaacattactggtgcttcaaaataatggttcttcgagccaaggagagtttatttttgtacttttaccttcttttctattacaagtaattatacttattttataaatatactataaaacagtgtccaaaaaagaaccaaagctctttgtatgccgggtctggtcaagagaacaagatgaccatagaatcccctcaaatcaaagtgcactgtgggttactccagctatatttggggtgatctgaagaaactattgataaatattttggccaggtgtaagaatattttaatttaaaattgcaaggaaatgaagaggaaggagcctaagatttcaagtaatgtgagggtttttttatccttcattttgtgctgtttcattatccataagaggaaagtactaaacaaggttgtgtcttgaaacagtataatctgtgaatagttttatttgtaggaggaggtcacgaaaaggtttctctctggtttcttcctgacaagcaatcagaggagttcacagatatcctgctttctaaccatttgaaagatttgaaaaattttgcatcaaattacatattgcttttacttttgattaaataaactgctttagcagattgtacaatcacgtagtctaggtaaaaatagttgcttcaattaagatatacggagatgaaatcctatggaattgacatgatagagctatgttatgattttactaactagtttatctcttctgtgtactacatatactgtcttcatctctcctttaatttctgacatgggttagtatagcccttgtttatcatgtactgtaaagagttagcagacactaaaagtactgaacatgaatcagtaacaattttgttaaagtaacaaatcagaagagattacatgaaatgtttcaggggaacagtcattagttgactttcattcttcagtgagccaggaaacattcgaatgacattaaattgtgagcctgaaagactgagtaagcattgtctagtgatgaactccttaaccgtgctcaactgatgttcatctataaaatggagacagtagttatctacaagtgttataaagttcatgtgtaaaatagattccctgtgcaaatctctatgcctactatccaatgtaatatttgctagtcattattttattaaattcttatgtgcttagccttgtgtagtaaataatttttttgttaaaaaataacttttcagtgtattttgataatgtagctgatacagtgtccttttgatgtctctccaatgagtattaatttgcttgtagtgctacatatgacacattgtttcagtatttcttcggctgtgtccaaagctatcatggcatttctgaggcttctggtttacaggttcaaagtattttttacatttttcagatttttctgagtgaatgatttttgaagtttattttatacactataaactgcacctatttaacatgtagtttgatgggttggatgcagtatacatttgtgaaatcatgactataatcaaaataatgaatatactgttgctttcagttttttccctgggtccctttgtagtcaatttcttctgcatgtccttatcatccatgtttttgcttgtaacattatttgtttaaatgatgagttgtattatatgactatattgtagttgttttatccattatctgttaatagcaacatgaatataaaatgatcagttatccaattattaactattttgttgaaaacttctatgaccattaatattttttgtttgcctttgagtaagtacctagaagtgttatggttagatagaatggcaggtctatgtttaaatttgtaagagcctcctaaactattctttaaatgtactacttttacattccaaccatcatcagaagagaatttcacttcctatacatcactgccaacatttcccaagtcttttaaattgtagccacatgggtaatgacttcaacttatggtattatattgtgtttttccttatagttgattatttggggcatgttttcgtgtacattttttcccataccatctgtgtattttctctgtgagctgttcaaatactttaccaagttttagtcaaattgttagttttgagagttctatatacatataaatacaagtcctttattagacattatgctttctagattctgttttgctttttttaattttttagttttcccattcctataaagtatcattcagagaatgtaagtgttccatttgatacaatcaaatttactggattttatctcttatgggttgtactattgttagcatattgcaaaactaaacatcaagtgtactttcttctattcagaaggatttgtagctttgctttttacacttaagtttgtaacccattattataataaactttttactttagaataattttagatttgtaaagttgctaaggtagtacaaagagttccctcatacccctcacctactttctcctattattaacaccttacataaccctgatgaatttatcaaaactaagcactggaattgtacattacaattaactttagtctttatttggatttcaccaaggttccttctaaagctagtcttcccattttacatgccactttgtctttagttctaatgttttcatcatctgctctgaaccattatagtgtctttatcatcctgtgtttttcatacctgtagaagttttcagctgtattgactattcattgggtagaatgaacttcaagaggggtttgtgtgatttttttttttcataatccaattgaattttgagatatgcacttttacctggtgttctggtgtttgcctggaattccagtacttgagaggtagaggcaataggattttgagtccagcatgtatggtatagtgagactatactgccccaacaacctgacaaagtgcccttctcatcatattgtatttggggctggctgtgtgagtgcaggtatgaatgcatgtgtgtgtggggggtggtggtggtgagaaatttgagagttgtggggtagggaagtcaatatgccctgtcattcttgttgtttatctttgattacctgtgtataaagttaatttatttttaccccttctatgttatgttctttggaagtaagtcattaaatatagcctagaagtaaggggaatgaagaggaggtaattatggcctatatagagaagtatgtacatcaattatttgaaattctgtaagaaagatttatttcagctgggcagtatgtaattcagtatgcctttaattagcatttgggaggcagaggcaggaggatctcagtgagttcaaggccagcctggtctacaaagtgagttccaggacagccaggactgttacatagataaaccctgtcttgaaaaaacaaaacaaaaacaaacaacaaaaagatttacctcctccttaattatttattatattagcgtgaaaccatatgtatttatttcacaccataggtcatattcatgttctatggtagttttttattttactactctagttgccagtgggagcccttttagatggctcctgggatcccttgagcagcctcttttatttattgatttgagaatttctttgcattctgacagtatatgataactaagcattatttttctttcttttcttttctttttggttttactcttttaatcgtttcttaaacgatccctggcccctgcttcttgagcaccagtagcagcaaagcagctaaccacccagtgtgtggatcctggtttgagaatttcattcatgtatatactcaaatttcatttacaaaaagtttggatatccagttctcacataatttattaaaaaggctatccttaacacattgtcttacccatttttgtgtgggtcagttttgatattctttattgtatctgtctatctttgtaacatattgtcttgattatgactgacttataaaaagtcttcaagtcaggtagtggtaatcttattttctgccccccccccccaccaagttgctttgctagtctaagtcttcagtatttccaagtggaatttgaaattagcataccaatacctattcaaaaaagcttgccaaaagcccagcttgatggcttctgtctgtaatctcagatgaggtaagaggatcaggagttgaaaatcatctttggttacacagtgaattgaggcctgcccgagctatttcagatcttgtctcagaaaacagaatgaaaaaccacaaataaataaaaacacttacagggatgaggacttcgaaatttcttttattttggatattatatgaaattatatcatttccttcttccctttcctccctccaaacactcccataaaatcctcctctgtctctttcaatttatggtctcttttttttccttagttgttgctcatttatataatacttgttcacttttatagccccagttgccctttgttataccttccttaacatcttttacttgtatgactctcccgttccacatatgcaaaaactaccagggaatgtctgtctgtctgcgattggcttatttcacctaacataatgatttctagttccattcattttcctgcaaacaacataacttcagttcctcaaaatctaaaagtcttctatgtatatacaccacctgataattggtcgatgatcacctagattgttgccattacttagctattgtgaataggttcctgataagcacaggtacacaagaatctctataaattcataggttttgaatctttttgttatataatcagaagtagaatagctgagttatttagtagctattttttttttttttagagaatctccatactgaactctatattctctgaatttattggtatttctaccaacaataggtaagctttctaccagtacatacccaacaggatctcccaattctgacagagatgcatttgaatctcaatgaagttttcaagggtattcctgattgctaagatttttgagcattaaagaaaaggaatttattgaccatttgtaattcatttgataggtgtttagttaatttgcacagttgttagttggattagattatttgttgtaggtgtttaatgttttgactttatagtttggtttagtctttctttcctgtaggcagtctgttcacttggttatttatttcttttagtgtttcagaagctttttaagttgatgaaatctcatttgttatgcaattatttatatttagaaagttactttctatgcctgatcatgatgcatttttgttgttgttgcattttgttgtttttgttgttgcatccgtatctttttgaacatcatcataatactggcttcatagaatgaactattttatgggatagtttgtggagtgtatacttacattctttttaagcatatggtagaatgtagagtgaatttgtgtattcttggggttttattcgtttattcatgaataaatttaatctgaggtttcaagaaattatttgacattgtcaaacttactggcatagtttttataatataacgacattatatatagattctatatattaactttcatttctgaaatttatgtttgttttagaggtttaggaattttactgatctttttatttatttttatttttttactttttggtttttcgagacaggatttctctgtgtacctttggagcctatcctggcactagctctggagaccaggctggcctctaactcacagagatccgcctgcctctgtctcccgagtgctgggattaaaggtgtacaccaccaatgcctggctctgatctttttaaaagaatgaattgcactttcagttttttattttccccttctggtctattttctcatcccttaaactccatgaggtttatcttaatttgatttggtttatttcttgcttcttagggtacagactgtggccaatcagacttccattcctagtacatgtttagtgccacaaattttcctataaatattgtttcagtgacatttttttttgatacgacatgttttcctttttattcattttaaaatatctttaactccactttggatttttctttaacctttggtaatttagaaatatatttttagcttgagtggtttgtattttcccaaagacctttgtgttactttattttaatgtagataactgttagtagagactgttctatgttgtttgttgtttaagaccttttttaaatttgaggcttactttttgatgacagtagtgtatatcatatcctatcgtttgcttcctgtattcatgttttgaagctcagtggttaggtccataatgatttaggattatttgatcttcttgacaaattaacaactttgtcatcatgaaattattctctttatctctggctaaagttctttctgtagtggcttttctgtgatgctgttgtagtgactcaaagtttctttgactgtggttagtgtactgtgtcttttttttttttcatacttttgcttttaatctttgtgggtctatacttaatatacattgttaagcagcatgttatgccttttatttctaggagtctgttaatctatgccctttaatttgaatattttggtcattcatatttattatagtcatttatttgtgtattatgtttttgccttgtcttatttttttaaccactttgcttttttctccattttatcttatttttgcttggttttattctgtttttcttcatgggcactagcccttttaaacatttccagttgtacccctgggatacctgctgtttatcaaaagacgcatatgacattttgtgtcacatctgagtaatgtttgaaaacatttttggttaggatattttaggaattattttttaatctccctgctaattttttactggtcataatatgtagatgtgaaaggtatgaatattgaagttggtatgtactgatctttttttaggaatttccttctatctattactttgtgcctggaagatttgctcaagtcattttgccacagtggatttttccaagaaacctgtagtttctagaagatttaggaatcctggtattcttggccattgcatattctaaagctagttttgaaactttcaaggctgcaaatttgctatgtacctgtcatgcaggtgctttctttttgtgcagtgaatccagacagttgcatgcagactggttagggctgactctttagctagtgaatgatgacagtggagcttatagtctagtctccatgactagggaagtgtgccaactgaagctggcttaattgtgcaaacaggagccttttgcagaaggactcatggtaattaaccaactcaaagtgcaatattttcctttcattaatttggcagaaaacaactaaatatctacagcaaaactgtttttgacattttcattttctgcttcgaaaataatattttgaattgcactatgtaagaaactgctagtatttttttcattttcattgtaacttcctaaaaaagtagatcactcaattagcagggcttatttatttttttaattaagtaggattaattggggagcaaccagaattgattcacatttttaagagataggcttgtaggagactctctgagagttgattagctttgttctattttgctattttcttccatgtatgtgtaaatattagaatagcaggtattattttcatattattctattttcaagttcacatctactttacatactacacaccatttcctgctcttctctaatttattttgggctaaataaattatacttatttatattaatcacttcattccagttgttaatttttttagcttaaaagtatgtttactgctaaccacttaacaagaaatatcttgaatattgttggaagggtctattgttagtaaatttttccctacagttgttgtaggaatctttgtttcatgatatggtagtcttcatgtaaatactgtcatttaaatctttttattaataatctttcataataatcatacatgtaataagcattttattacataatactttccattctgcaattttgagacattttgtggttataattttgcttctgtgtatagtgaatatgtttactcagaaaagaattcatattttaactttcttttgtttttaaatgtcagaaaacaatttcagtctatccccaaagccaaatggagaaggtttttgggatagcttcttaaatccctccctctgggaatgcttggaatgcactatcaatcacatcagtagggacttaggtaatgctcttctcatcattaatgcttccttcttctacactctttgtacatttaatactcagtgctggcaggtataccaggctgtcacaccaccactgctctttggttgtttagttggagtggccagcatagatggagagagcagtatagatagagagaccagcatggatagagagaccagcatagacggtgagaacagcatggatggagtgtccagcatgaatggagagaccagcatgaaggagagcatcatagatggtgagaacagcatagatggagagagcagcatgaatggagagaccagcatggatggagacaactgtttagctcaaattccaaaaatctctggaaagagaatgtgaagcatcttgcataatattgtaactggttataaaaacatgcagtagtcaaagggcagtgtgtcacaaagtataagcttcactgctgcccactcagttaatggtagtgtaagtagttgggaatgtggttcagtttatagagtgtttgcttggaatataggaaaccctgaatttgaaatacagtattaggaaaaaagaaagaaaaaaacaagtatggtgtcacagtcttgtaattttagcaagaggttgaagcagaagattcagaaactgaaggctatcctgtgccagattggaatttgggggttggagtagagactaactgtggttaaactgggtacataaacataagtatgtttgcttaatcaataaaagtgtttatgtccaaatttgatagaaactgctattggcagagatttaatggtgattaggggaaatatagttctaaaccttgaggcgcttacatgctagtaggtcagtggaattttattttattttattttattttattttttatttgttctcatataaaacatcccaaccacagcctcccctctctttactcctctcacttcctggctgacctcctctctcccagattctttctctctctctctctctgtctctctctctctctgtctctctctctctctctctctctgtctctctctctctctctctctctctctctcacacacacacacacacacacacacaagagcaggtctgctagggacatgaacttaccagggctccagatacaagatcgggcacataccctcaaatgaaggctggacaagggaacccagtaggaggaaaggggtcccaagagtaggcaaaagagtcagagacaccaccaccccactatcaggagttccccccaaagcactaagccaacaaccataacatatgcagagaacccagtacagagccatgcaggctctgtgattgccacttcaacctttgtaagccctcatgtgttctgcttagttgattacatgggccatgctctcttgggtgtttcctaaccatctgtctcccataattccttctcccctcttctagggggtttgctgagctccaaggggagggtcataattccttctcccctcttctagggggtttgctcagctccaaggggagggtctcttcatcttctcccatcaggtgaagtctctctgacctctggtttaggtactgatctatgagtacagcataacatcattaggaatcatttcactgttttattgtttgtttgtttctgcaagtcatgtttggttctactctaggtctctgggcaatccagcctccacttcctgccatccaggaagtatctgggacatgggctacctcttgtgtcatggacctaaaattagaccagtcattggttggccactcccacaagttctgggccaccattaccacagcacatctttcaggcagggcagattgtagtttgaaggttttcttgctggtttggagtctcagtcccatcactggaagccttgcctggctacagaagatggaaggttcaggttccatatctcccactacttggagtcctcaatatggtcacctatcttaattgattccaaggagttttgactgcattagattgccatgtttccctccccacctctgccatgctcttggactctagtcatctctccctgtagtccctcatcatcccaacacctgatccctcctattcccatccacaccatcctcaattcaacttcagaatcttttctgtttccccttctcatggagatccaatgcatcctctatagagccctccttgttacttaacctgtggattatagcatgattatcttttactttacagataatatccatttataacttagtacataccatgcttgtctttctgggactgggttatctcattcaggatgtttttttgttgttgttccatccatttgcctgcatatttcatgataatttttaaaaactgagtaatactccattgtgtatttatccactcttcagttgagggacatctaggttgtttccagtttctggctattatgaataaagatgctatgaacatagttgtaggacatagcgttctttgggtataggcccaagactggttatcttacctagggtttctattgctgtgaaaagacaccatgaccacagccactctttcctttataggaaaacatttatttggggctgacttacagtttcagaggttcagtccattatcatcatgatgggacatggcagggtacaggcagacatgctggagaaggagctgagggttctccatctttacttgcaggcagaaaaatcaactgtgtgaaacactgggtgtagcttgaggataggagacctcaaagacaagccccacagtgacatacttcttctaacaaggctatacctactccaacaaagccacatcttgtaatagtgccattctgtggtgggccattttctttcaaaccaatatagtgatatagctgggttctcaaggcagatggattcccaattttctgaggaaccaccatattgactttcgtagtggctgtacaaatttgtactcctatcagcaacgaaggagtgttctttgctctacatccttgtcctcattagctgtcacttgtgacaggtgtaagatggaatctcaaagtggttttgattggtattttcctgatggctaagggtgtggaacatatcttttaagtatttctcagtgatttatgactcctttttattatatacagaattgttttagctatcctgtttttttctcatatgatgttgaatattatgctttcaaggtctgtaaagaattgttctggaattttgatgggaattgctttaaatctgtagattgatttgcggaaatggccatttttactgtgttaatcctacagatccatgagcatcgaagatctttccatcttctaatgtcttcttcagtttctttttcaaatccttgaagtttttgccatacaattctctcactggcttgattagagttactcccaaggtattttatattgtttgtggctattatgtagaatgttgttaacctgatttctttctcagtctccttgacatttgtatattggaaggccactgatttattttattttgttttagttaattttgtatcctaccactttgctgaaggtatgataagccacaggagttccttggtagaatttttgggttgcttatcctatattgttatcatctgcaaataagatacttttatttatttctttttaatttgtatccccttgatccccttcagttgtcttattgccctagctagaacttaagatactactttgaatagatagtgagaacatggacagccttggaaaaattatttcatgctagagagatggctgagcagttactctcacagaggacctggtttgagttagcagcacctgcatagaggctatacatctgtaacctagttcttgagaatataatgccttcctttcaactctgtgggtcctgtatgaacatggagaatggagaacaggagaatcacttgtacaaataaaagaatcatccctaaagtaattaattatgtaatataagcatgttacgtgctttcaagcctcactgcctcgaaggaaaacagtattttttttttttttgagggaagtagttggggagagggtaaggttacttattttgcttacttccttctaaacagaagaaatttagtttaagcatggtgtagttatgcaaacaaaagatggtcattgagcatgaacaaatagagtaatttgaatgaatttctaattcctaaaagttatttgtcaatttctaagagctagtgtttgtactgtctatatataccaagtatgtgattttagtattagttataagaaaacatataatgaatgttaaagatactattattttcagtaagcttaatattaagatggacatttatatgataaggccatacaggataacatcataatgttgtaagaaggagcttagcattgtaatcaaagctttccccttaaatgtttatttatgggttcatttatagaaatctttatttagcaatttattatgtgttagaaagtttcagtcattatggctatgaaattaatgacaggaacccacttcacatagactatcaaatttctgctacccagaacaccctgtgctgagtttctttttttttttttcttattttttttaagtttttaaattttaattagaaagaagattattttacatgtcaatcccaggttcctctccctcccctcttttcctgccccccccccaactaacaccctacccatcccataccctttttgctccccagggagggtgaagccttccatagggggtcttcagagtctgtcatatcctttgggatagggcctaggcccaccccctgtgtctaggctcagggagtatccctccatatgggatgggctcccaacgtccatccctatgctagggataagtactgatccactacaagaggccccatagattttcaaggtctcctcactgacatccacattcagggtatctggatcagtcactgtgctgagtttcaacttaaaaatgttaaatcatatgtatgcatatatgtctctttgggagtatatgcacatgagagctgctgttgcctacattgtctagaagaagatatcagatgtcctgaagctcaaggtggttgtgaccttctttatgtgggtactgggaactgaagacaggtcctctgcaaaagtaacatttcctcttcatagttatgttagttagattttcaagatatacaaagatatatttcaaatgaataggtattcttcaaaatcttccaaagacatacagaatatggcatttaaaatagtttactaggatttttcatgccaaagagatacaactgctcctagcaacaccagttgtatcagagaggaagatgggcatctaagaaactcattatggagtttgccttcaacatggcaagaccagccatttgggcaagaaactgttcttgcctcaactgtttgactatgtgctgtgtaaactagacatgtagggcccacaggaaactgactgctgaacttgccaaaactagatgggacagtccttcagggtttgggcttcatggaagaatctgctgacaaactgccaatataggtgggacagtttcaaatttcctgctttgctgccagacactcttggtctataggctgaagatggatgcctcaacattacagaataactttgggtgactgtcttggccgtgagatatcttggccaattctagagtttatatattatccttctgaggtctttgatgaagttgaagacagatattcttatggttttccttagttatgataaaagataagttacatataaaactttagactcacaaagatatatgatagaatattttctttaaattttgctacatattagcccattaactatagttattgtttgataactattttgttctatataattttactatgttaaagttaaaaccttttcatttagacagaaaagaggagatgataaggatgtccttctgtatgctgtttgtatatatgtttctcttattggctgatgaatacaacactggttttccagtagccaggcaggaattataggcagggctaccagatgaggagaattctggggagaggatacaggaagagaagccaccagagagatgccatgtgccatgtagccgctaggaaggtaggacacctgggcattgtaaggtaagatacggccatgtagaaatatatagattagtagttatgggttaattgtaaagagagaactagacagtaagaagcctaagccaatggccaaacagtttgtaattaataccagcttctggatgtttattggggactgaagggtagggggaccatacaggaaagaaactaccttgatccctagcacctaaaaatattttactatttaaaaacaaaaaaatgtatatatgtattaatgtggatatgtttaagtagttttatatatgtatatacatatatatattcacacacattgtttaatgactaacttatagtaaatatatatttttctcatccatgtgctactcataatcatttctttacaacatatgtggctgctttcacagcatatatgaattgtttgacctctgtgcccacaagtatttactgtctgagcttttactgtattgcagtgcttccccatttagaacatagacaggtagcatggcatgcatgatggaaactgactttactttattgattatgagcagtgttaaggtctagtcagtgattgaactctgaaaaatggtgatttaacacattttaactttcaatatgtactccaatagaaatacttgggagactgacataatacatttgaagatttataaatggagctcttaattgatctaaataataaaacctggaatcagatataaaagaaactgctgagagagcagagagaaggagtaagccaaagccacctacctttacctcattagcttcccagtggaaaagagagtgaatgcctgtttcttcctatttatatcctctcttcttccagccatgtcacttcctgtctctgcccggccatcaaacttcatgcctgtacagacctccagacttctatggttaggtagtgacaagctccatcctctgctcttcacacaagctttagttgttcaagcaagatatcaccacaaacattaaaaagaatgagtcaaaatatatgatgatataggtatggtaatagagatcaggcttatgaaatttaggaatattataactatcataatgaaataaaaagtggaaataatatgtatgtatcctgcttatgtttaaagaaaaaattttatataccaggtctcactatatttcctagtctggtggcatcaaactcatgtagtcaaataatcttcctgtcctatgctaccaattaactggcactgcaattgtctgctgccacattgaaataatttattttatttttaaaaattgcacagttcttctcaggcaaatttgagttttaatggtatttgtcttgtgtgaattgcagtagcttatcgatttacttatatgtgtacttaggagactaaactcatgcacaggcgttttccaatgagaatataccagtagtggagctggaatgaaaatgtaggacttctgattaaactgaccaaattgtacctaagcatggggatgcatttatagaaggttagaggcatgtaacccttgcagaattccaggctcacattagatcactttcttgttatgtggtttgaaatatattgtcttaacatacgttaaaaaaatgtattggtcatttaaaacactgataatttttcttattaagaagctctgatgatttgaatctaagaaatctctctttgagcaacatggaatgataaatgagagaaccagatcaaaaaatctaattcagctaaggttggggactttgtgggttctcagagtgattatatcatctctctgcatgtggctgtggttggaatctgtcacctagacaggaacttgtggctttatagactgcttcaaaagattgaggactcagaatacaagttcacttgaaagcctgtggagatgcctggtgacccagagtatttttgcccaatattttccaaatgttggctcacatgagtactttgaaagtgaatgaatgaagtttctgtgaatccaaaagagagtgagagaggagagagaggagagagagagagagagagagagagagagagagagagagagaggagagaggagagagagagagagaggagaggagaggaggagaggagagagagagagagaggagagagagagagagagagagggagagagagagagagagagagagagagagagagagagagagagggagggagagagagagaagcactgagaatggattgtttccttggagagtacctataggaaataatgcctacctctcctggtgggaaatacctggggtcatctgttctagaatcagccaggcatagtgaaaatgtgaagttcctagcaactcagaaaatgcttatcaattgtatctacccttacaaactacaagcacataattaacatcagatgttaaatacctaattttcagttattcttcacactttaagataattcaaaaggtgttatggacccttaaaacaaccatggtccctaggccctagccctaggccttgagtatgtctaagcatttgtttgcattaatatatctgatatcttctagttgagaaaggtatgctcaccaaatctgtgatattatcagttttatgaattagtttttaaatatagaggtgcttgtatttatactgatttctcatttaaatctctcatgattccctagagagagatgtttctataaattttagttaaaaatataaagacatttatatttaacaagaaagcaaatcaatgctagaattggcaagcgaggagaattctgaaaagttgaagtattctgaattgtctattttagtttgacttgagtgaaagtaggaaggtagagttcaggaaggaagaatgtgaaggcagctcgtcagtaggctgtgatgtgattttccttgtgtccttacaggttatgagaagttcagtcagcactgacgtactgaaagttctgttgaagacagttctattcatgttagaaactacacaactcacaataaaatttttcatcatcatggttataaagttccaagatttcatttatttttgtttttgttttttaatatctgatctcaggatatggcaaggctggccctggaacctgaaatgctctctcctctgccttctgaatgttgggaaaaggcttgcaatgccaagtccagctaactttatattatccaatttttttaaaaagcattttatatgtattttacccagattaaaactatctaaactgggcactaggagagaagagaactatgaattgaaataatcagggaaaagaacagtttaaagcaatgcagagaataatttctgttagtggtattggaatccacctgcaatagaaaattacaaattgtcctaattttgaggtagcttcttcaagagttgaattagcagttgtgagcggatatgtttctaaggaaaaccacacatttattctggcattttgtttaacatcaatgttctgactatgtgacaaggacagaatcttagcaggaactcttgtgtattctagctgacacagcagaggtcagatgttagaactctaaagaagtgtggagcaagagcctagaaaaaaaaaaaagattctgcacaaaataagattttgacttctcacaggtgtttacatgaattctttggctgagtgttgcacacatgccattgagattgggtgatcttactggaatgtctgtgctaataattcctaatggactttggagctctgtgcaaagcaccatttgtaatattctagccttccagttgagagctatattttccataattttaaagcatggtcccctgccgtagtcttttttgctactataagaaaatacccaaggctgaacttcataaggaactgaattttatttttgtaacttgtgtatgctgagaagtctgagatttaggcaccatctgattcagttttctggttatgtctattcttacctacaagatggtgctttgaatactactccttctggaggagaaggattctgtatctttacatggcagaagatggaagggcacttctttatttatgaagccattcccatgatgtccataatcaaaaccatgattgtcctcatcagttggttgcctgttcccatcatgttgccttttacaatttcagctcttgaactttgcaggtcatccattcaaaccccagcaacatcctggtatacagctcattttctctttaggaaaactaaaaccagagctcaataaaatttgggggagaaataggttttaacttgccaaacttaaaaaagtttgataaatacactgggcctttctcaaacccatcccagcaatatacaaatcagttctaattgtttagctgatgacatcactggttgagatcacaaattgttcctctctaaatgtccataaaatggatttaggctacctatattttattgttacaatgttcaatataatttacaaaattattctagaaaaagtaaatagaagtcaacctttagatggccttgatgttgatcttagtgggcaaaagttcatgtgcaaacacctatacagagactttaaaacaagaacaagcataaaataaagtaatcatgatattaataaacaaacaggtaggaaatcagaggcctaaaaatgaaataactaaaataagtgaaaattatcttactggaatgagcagtggtcaaaatgcatttgtttaaccacctccaataagataccaaggaaaagctaatttcatatatatcttttgaagaacctagggataagatgtaggaaatgagcagtgactgattcagggttttacaaatgtataataattgaagttatagcaagagaggaacatgaggggattataaaatacttaggttgaaaatgtaccattttaagtataaaaatgtcaagcttagaaagacccaagtataaattgactgtatataatgtatcatattaaactgccaaaatagccagtagtcattaaaatgataatgaagaaaaaaaattttgagacagggactcactatgtagccttggcttgtctggaattctttacatagagtaagttggcatcaaactcatatgaactactgggattaaagatattttgcccactttgcccagcttgaagaaaatagtaaggaacctttcattatcataatagtattcatgaaggagctaccaactttctctaacttacatatttagaattactgagccataaagttggcatgtgtgggttcatttaagaataagtttatatttcatattataagatgcatgcagacccactagataaattgtacagatataagatggaagttgctttgcatctcatggctcttggatgtctgatctcatcatgttttcattatttttttcgatgggcaatagagatcatttaacaaatagtgttacatgagagcttatcactagtttatacaaccatattaccagttataatttattattgttgttgaggcatggccttactctttagcccaggagaattaaagtttttggtgattctcttgcctcttatcacccagatgttgatataacaggtatggaccattgtgactaaactatcactgcataaaataagccttaaaggctgattattacgtgtttctgttaagttgatcctaaaatctcttttatggtaaaagttcatggtaaattcagcctaaatgcaatatataaatgtatgcatattatgtatatatttgaagctatgccaattatagatgaggaatgaattgcagagtataaaaattgcttctaccttctgtttctatattatgaaacctgaatttagagtttctatctcaattgataagacattcagttatgtattagaatttctgaattattgatgtttatcactctttccaatatttgagacaattgttgtgctaaagattttcagggatacacttatgtgtatttattttttctcatttaaatgatattttaaaaaatgaaattgaagtgattttgcaccaaaagttcaccaaaagacagcctcctgtttcttttttattcagagatttttatcagaggaatgtagactggaatctgcaatggttctcaaaatcccaaagtggtaagtgagaccaattaagtcttttcttaccaatatttagttgtaatttttctctatagttctttaatgagatatttaaaatgacaagcgacatcaattccagtgcttacatatctaataactttagagtctagctattagaaattatatgtttgtgttcctaatggttttgacttatttagtacctggaattgggttcaagaataaaaggaagtgggtgtgcaggaggctatgaatcctcatgacattgtccaccttgccccatcttttttgagataaacaaaccacatcctaatgttgatgtatggccctagttgatcttgttagattgacaagaaaggtggtatttcctgtttttactctaccaatttaagaactagaacccacacttataatctgtaatttaagtgaaatgttttgaacactggcatataaaatattaaaaagtttaaaagagtgggtcaaaatttgagactaatatagttataaaacattgaagatctgaccaatgaaagttaataatgtgatattgtaatgaaataagagaactggagtgacacatttatttatttcattacataattgatttaattgaatttgggattgatagtgacaaaatcattgatagtcatcaaaaacatttacttgtttgaaaaatcctcataaaaaaatcagggttgtggatctagataactgatatagaacttgcttagtatatcctggcttagcacataacacatgcatatataatcatatgaacacataaaaacaaaagatgttataaagttcaaaatcagttttcaatctgacactttagatttatagtaaatttttctatgtatgaagttgatgttcgtgttgcaagtaataaaaaatattaattacaaaatatttgtatgctttctgaggcaagagtcttgtgaagtagccttaggtggtttagtatttatgatttagatcaagctatccttgaactcagtacaattctcttgtctcaaggttcaaagtgttgggactgtaggcatgtcccaccatgccccattttaaagcaatagcattaggtaactagacttgataagttgtatatctggtcttacaatgtatattgagtttattctaatataaatctacaaaatgcttggagttgaaaatgactgtggtatctatctgaatgaccttgaaggagatgacttaagcaaaataactcatgtaaaaaaaaaattagtacgaaacacttaactcaaaagttgaaatacagtgtgcctttgggaatggtccagcaattcagactttgttttaacatgctcgtattatacttattctggtcctgcctggtatatttttgatggcattaagatatttttttccatatttacttgtgctaggagagagagaatttgactgtatactcaacaaatggcttaatatataaaataacttgattcaattattgtagataatattttaacttcagatctattgtgtctggattgtgtgatccaggagacaaaggtgaagttaattactttgtagcccttcaaacctcaatgtaaagttattgtctttgataaaaagtaaaaagtaaatgttaagccagtttgatttgcacatacctgtgccatcagttttactattcttcccagcttaatctctttgagaagttcctatttcatatcattccacctctagttatgtaactttccccacctggcctatacaatgatgggaaaacccagatgtccaacttgttcttcattggaaacatagggcttgctggacttttcattatcaacagtttacttttattttaggtaatattgaaattgcatcagacagtaaagcagttgacaggtaccatggtgcacatatgtaaatcccagcaatttgaaatagaggcaggagttcaagtttagctttggcttcataaccagtttgcaaccatcttacgctgtaagagaccctgctgcaacaacaataataacaacaacaaagcaaaggaaaatcagaacaaagaaaaataatcatcataaattatatttcattttccactaaggaagaattttatgattagtattttatactaatatgttttaattagtatttatgaagtactgatataaaggaagcatggaactttgaagttagtggtttcagattaaacattttattatgattttactggaacatattgtaatgtaagggaattttagaggaaatctaccctatcatcctaacatattttctagctagcgtgacaggatgaattgagtatgacaatattgtgactcttaggaagctcattgctctgtgtctgagacacacagtaaatgtccaagacatgtgattcagtatttggtgcatgttttgattagaatagtttttgcgtttgttatatttagacagaacaagtatgaatttatgatttctaaccactagaaacttacttcttccctcagaaagtagcctttagatattcactgtcagttacacgtgtctctattttatcctcttatcaccagttcaaacagcaaatgtttctcatatatgattgaatttccagatatactcttagttcacttggccatcttagtttgcacacaaacttaaaaggttcatagatgtagctgctgtagtcttgataagatttgagtgatacagtaagtgctgattatatactgtcctttgttgcaaacatgatacttctaatgttttattttgaaaagtcatttggtgtgtgtgtgtgtgtgtgtgtgttgcagaatatagtaaagatgccattttaagctgttttttcaggttttaaaagtttacgtctttgtagtctctatcacaaccaatatgctgattttttaaatatttttcagatgctgtataaagtagtggttttccttgtgacactttcatataacctttgttctcatttgctcccttcctcactgccatctgccatctatctttctagccaccctgccccaatagttgttccttctgccttcatgtcacacatagttcattaccctttaatataaattctttatttctgtagatttcagccatgcatactatatatacaccatttccatctcactctccagttcataactcctctcttctttattattgtcacacatatatttacataagtgcaaatatatttgcatatgcacaatcattttagttcatttattgttgctcatatgtagatgtgttaaggccaaccagttggaattagatgatgtatcagggggcttattcctatagaaaccaattttccctctctctgcagcaattaattgcttcttctatggggggagcttgtgatccctccttatccatgtctcatgtcaagcagtgttttgtcattaggtcttgtttatgcagtcatattgctatggtccccttcctttctagtttaatttcacaattgcctacatgtatacatataaattaaaatctagggtctttttaatttttacaagttttttttttaaagatttattttgtttgtttagtatacagtgttctgcctgcatgtattcctgcttgccagaaaaggatatcagatctcattatatatggttgtgagccatcatgtggttgctgggaattgaactcaggacctcttgaagagttgtcaatgctcttaacatctgagccatcactcaagtccctaggttctctgtataagattaaaatgaggtatttgtctttgtgaatctgtattttttttttaactgagcagaaggggatttccgcttgtatatattttcctatagatgttatcatttcatttttctttatgttacataatattccattgtgtataagccctacattttcattgtccattcgtctgttaatagacatctagtttggtcctatttcttagttactgcagcaataaacatggttatgcaacaactctggtaagaattatcatcctttaagtatatacccagatatagaatatttttacagtcccaaagttactttgtaattctaagtagtgtcaatgccctcttgtattcctaatcaattattgattccattatatttatataagttacatttttgctttctagtatttcatattagttgaatatattatatctggtcataccttgaagataacatgggttaggttccagattgcctcaataaatctaacatttgaaaaaaaaaaaaaacaggaatggaataaacaaaacaagaaccaggaatgaattgtaaacaagtaaaggaggtaatgggacagataaaacaaggatgttgtttggaaggatacagtgggctataaaaatagttgtggactttgctaagaaatccacctctttccactcaatcctctgtctgtgtgagatgtaaaaatgtctgctgaaacactcttaaatcagcccagatccattgggaaatgtagaagtgaaattcttccttgcttacttgtcagtgtgacctccgacaagtattaatttttatcattccttctaattgcaaaatagaattaagagtaaaaatgtaccactgttacaaataaagtatgaatttgaataaaacataaatatagttaaaaatttcatttggaatttttatgtgaatggccaaggtctaactaaatttcttgtgatgatggtattgacgaactcagtcagccttcaaagctgccttcattttcttatcttgttctgggcttaagtgttcacctgctgattgctcagtaggctctgtgaaacatggaatagcccatccttctttaaagagtgttcccacatttttctggccttctctttcaagtgctaaatgttgtttggtgtagttcacaggaattggatatggccgcatgtgatgagctcattgctccttgtactcctggtcacatgcattgctttctctgatagtttgtttgcctgtcatcatgttttacagtgacaaacctcatcatctcttaaaaatgtgcagttaacaagaccccctatttagtaagttaaaacagtttattagaataacctatcttatttaatattttatttacaaattcatttatatacatactgatgaagcttattaaataaatgtgttccacatttattttttaatacaaaataaaaatgttgagatgttatattgctgggtgctattgtttagccgtttaaaaacaattttgaaatgaatgttctgttttgtgagatgtaacactcaagcccataagttggttgaatgcagcacataggacgaactagttgaaggcagcaggtcagagctagcaggaacttccgtattgcttgatatgctggattgctacatttttttcttgatctataacagtccattaactacagaattcttcactgactcattgtccttactttgaaaagaaagtatgcctctttttgttttgacaatgattttcaaattactgaaatagtttctatttttctgtgattatatcctcttttaacttaaacaattcaagccacatcttgactacaagcatgaaataattataaatcaataaatactatgttataatgttagttgatatataatgttagttgatataatataatgttagttgatatttctttacctcttacttagcatcagacatatttgtaagccaaaaaggcaatgtctttagtgcttatgatcactctaggaagtgggaattattaattcataacttggaaattgtgaaaactaaggctgtgattgttagtagtgataagccagggtatgaatccagacagtggatggagaattcagcactcctaactgagtgcttgtctgaatacagacaattgataatgcacagatttctcatattaaaggctaacttgtacatctgtatctgcttttattagactgaaataagaactattagaattcagatactaatatttagctcctatagcagagatggctcatttaaaaaatatttactgttttaaatgctattaagcaaattgtactccttctagaactgatctttacatttctgtaaatatgttggtcttttaggaatagccctagaatttttccaagttttaatatttgatcaactataaactttttatatttaaaagtcactcttgagtttcttattaaacattgggttactgagtcatttatttgtgcttttcttgactcatgtttgtggaaggtgttctgcctttcaccaattatagtattatattttcatttttattcagtttaaaagttttcaatttccctttttatttcttctttgactaccagtcaatcaattagggatatatatatatatatatatatatatatatatatatgtatatatatatatatatatacatatacatatatatatattttgaattattgctggtactggggtaaattttagggcctcactcattcttgattgacacattgttgctagttgtagcaccagccatgctaccgactttcaagttacttttgataggattaattccttttttttttttggcattatgatctgtcttgataaatatcctgcctattcttgagaaggtgtatatttgggtattgttggatgtggtgtcctatcactgtcgatcaagttggttaatattgtttagtctgtctttgctggttttaaaatctccatttatgatagaaagtcttaccattttcaaatgtcatgttttgctttattcaggaacattgcttgtgggtttcttgtcctgccatgtcctgccacccttctcagccccaaatatgcacacaaagacttatagtaattattaaactgttggtagatagcaagagcttcttactgtcagatctctcttaattattaacccataactactaatctatgtatttctacatggccttgccttaccagacctttgtggtctacatggtgactgttctgatggactccctctgcctaattttcccagaattctcgttgtctcctagttctgcctaccctcctgcctcattgaccaaacagtgttttatttatcaaccaataagagaaacatatatacagaaggacattccccatcataggagttctgaaaataggcacatagtatttatgatctctatgtttttttaataagttgactcctttgtccttatagttgacccactcattcctgatagttattgctttcagagctacatttttatttaaatgaaataatttctatgatctattttatatcctttgcttattgttttacgtttttttttgtcttctagtgattagtatagactttgaatatgcctctttaacttaccacagtattccttcacatatacactactgcaggcatagtgtaagaaaagcctgtgatggccaacagctcttggcagtggggaacatttatgtttccataccttttgggaattttgaaaaacactgctctcagaaattttcctggtggcttattccttttataggcataatggtaactactgttttgttttcttttgctttcctttgaatgagagtaaggttaaaataactttaagtggcagaaatatgccaaatatagcataatataacaaatactgttagtgtaatctcttaagtttgtactcaaattctagcactatcacctgctaggtttataatagactcccaattttcataactctaatgtggatatgaatcacccagaactattcttggcctgcatgtgtaagaatttgacttctgtgttggtttccatgattcagtgagttagtatttacttacaaatacctgattaaaatgtttgtcagatcataggatttaatagtgatttgccatgtaaagattctagaagttactggctgactcccaagtctgtgctattgtttttgattttcaaactttgaccattcctttccaccttgagacagatttcacaggtgtcagaaaagatcatttatgttgatgagattactatgagttaacttgataatccaaatatgttcaagagttggggagatacaggtagcaagtaagttacaataggctagtggcacacacattcaggaaatgttacctgctttaagtggcagacacatgcaggaatgtcgctgctcttattatctacaggaagagaattggaggattagcaccaacataggatactgtaagaagaaaggtcatcctgggtctcattgtgttgcattcattgagaagcagtttgcattatggaactggagtttgggtgaatgaaaaggatcttggacaatagatgtaaaagtctttgcaatttacaagtgaaagttaagcttcaaaatattatttcagggacactgtgtgcataggacacaaaaaagaaagaggagcatcttcagtagtggagaaaacaaaagaggtagctgaggaaggcatgctttttagatttttggagcttttcttggattaagtgagttaatatttatttggagttgatgtaaattttataagtttatcctaagcagattagaaaaataaaatgcctataaaatgttagtggtaggtaatgcaactttctcttttggtaagatagcaaatatgtcactgggccctttcaagttggcataactaatgagaagttatggtgtttgtaactatttctcactggttttgcaagaacatgattttactcttaagagtgccttttctcattcatgctgcaaatttcaaatgtgaaacaaactttttccccattaactctgaaatgcaagaaaatatacaaatatatgagtatggtgagagcatagttttatagttttatttatttccaagtatgcttgggaatacagactttggagaactctgttcccagtggagaacagcatacattgtacaaaactgtactaagaattaatgtgttaatatttgtgacagctacatggtaggtgctcaataaatggtagggtttgggttgttgcttttgtttgttttagatgtagatagggtttcgttagcccaggctgacctagaactccccgtttagctgagcagtgtggctgattatgaccgtgaacttcagatcttgttccttcacaccgaggcctaggacctagcctggctctgctttgtattgtttgggtgagattgggaaggtgagggtaaaagaaagaactaattgatggcaagaattctccactgcatctttactatttttcaggttgtctcggtggagggagtgattgttatttttctttgcctgagttattatcctcccaggtcaggataatatgcaaaacaaaacaaaacaaaacaaagcatgcagtggtggagagggggtttcacctgtagccttttgctcagttgccaggagggttgcccctataggaacttaacttggattccttctgattgttctgactctggatgtgtcaaagcagtgaaatgctggcttagagtcatgttcagcaagcatctgctcttcatcttcacagctagaagaaagggaaattgggtaatttctaaaaggaaattatgccaggaatccacagtaatttaaatatgtttctccatggagattccaatttgtttctttttttgtaagttaaatcaaactaaagcttaatctaaataatgagggcagggtattaaaatgttcacttttaagctacacaaattcttagctataataaatatgttccaaattttaaacttatatttataaataattttattgaatattctcggagaacctgagccacatcaattataattgctgagttttgataaaaatttatgatttggctttagatgaattaggtatgctattaaagaattttggttggtttgtggaacattgtgctttaacaagtattttcataatgttttcttggaaacaacaacattttgatggtttggacgaaaagaaaaaggtctataactgaaaaaaattcatgtttcattaaacatacacattttacagaagtatctatatttcctaagtaaaggttttttggtttagttttattttgtttttcctttgttttggtttgtagattttgctttcttactgttaaactggggaaacttttatgcatttaaagtgagatttttagactcatctctttgcaacatattagaatcttatttcaaaattacattatttttatgtacattggtctttattccacttatgttaaataataaatagatttttaatatttgtattagtgattgatacccaatttggaagaaaaaaatgaatttatctgtaaaatttcagcaccaacgatgtaatatttagaggtttgcatttttcctggatattcagatgaccataaaattccttctatacaaatgtacttttgtgaacaggttggtgaagttaagtgtatactgcctcttgatttggagcagtagtttcagaaatgccagtctcccccaatctattttttcattaactgtttaccaaaaacatttactttctataaatacattggagcactctcaagaagaaaaacagtcaagagaataaataattctttcttaataatttgttagaagcttttttgcttcttttacctttctactgttaattaccatttatggacttgaaaacaaaaatagaatcatccaggggtcatgttaagagcgatttctgcaactcataacattactcgtaatgtgatacagtagagctttcactttggaggtccaaataaatcctggtataaactgtgactcagcctggagtacatgtttagccttgctctctgagcctgggtttctctgaacatagtcgtgtccagtaatacaagactaattttgacctttactggtactgctatagtgcagtgctgctttagggtcaactgtagaagccaagaatatataacaccatggatttgatttcacgatgatagcattattttcaggcaccaaacattttgtccatgtttgtatatataacatagtttgcctgtttaaaatgaataattctcatatatcccaggctggccttgaacttatatagttgaggatgtgcttgcactcctgtcattacacatgttgctattattttgggcttttcctgcatcttcaatatccatagtgttcaggtaataactgaggtcctatagttaatgtgtaaattagttgtcaggatatgtcaaaaaagcctgaagaataaagtaaatggcataactaagctgcattagtggcagtttatttgcacagcagtttggaggtgctatcttgtcactaccaagtttatatggagtcctgtgttctggcacgggcagaggagaaagtgatagggtaaaggaaaaagaggagtgatgactaggtagtctcacaactaagaaaacccttgttctttaattgtaagagaatttattatttaatgttaaataaattgtataatgaaagggaatgtgcttttcataattaactattcagttgtgtttaggaaatattttttgtaacattagatgtaagaaaactgaccacatgtaactatggcatagccattatatattacatgtgattttagatgcataaatattagattactgttggggtataacaagatgatagttgataatatcttcataataataataactatatgtacatcaaaacttctctaaggcatttccttcaatgttgctttaaaatctgtcaatacttctgtgtatattaggtctgacagctattaagctaataaaatccaataggacatatccgaatgattaaagaatttaagcagtatgggttgtttcaaatttacactcacacaatagaaattgtaaatgttttaaaaatgaaaatgtaaacataataaaagcatagaagcaatttcaaaataaggatagttagtgcatgcctcggagagcctgtaaactgctgcacaaaaccgattatcctcgtgagcattcaatgcagttaacagtgaaaagtgcaccttgtaaaagctgttacacaaactattttgtctaaaaggtttccttctcacaccctgaaattacacttattcacctcaagtgaagattcagaatctgttccttgtttattttgattgcagttactgatgtgttgaattttgcttcctgttgaactagaaattagtcttttgggtttcttcattgcaataaaaacacaatctgtactgtaggttacattcaaaaatagtgaacctaaattactgaatacctgggatcacacaaaatagccaaattgggcccaaaagctctcagagtatatgcagtgtgcaaacatttagttggcattaccacacacatttgcatagtttgccttatttgaatttttgttaaatgccctgaaaaggtgcctgattcacttatgtgagaaagagacttggaaacttttcggcgagcctctgatggtgggaatctattctccatgtgatacgaatgtttctttcactgtgcaataagcacttggagcccctggcagcagtccctgctctttgtgacagccttcttcttcttgtttctaagccatgctctgttaaagctgctttaaaacaacaacaacaacaacaacaacaacaacaacaaaaacaaaaacaaaaaattgggaactgaagtcctgagttttaatgccaaatgtaatgctaaccaacgggacctcttttaatactgatcttggactctgaattgggagcctgggtacttttcagctttaaatgctgctgttgggaaaggtcagctatttgataattgattatcctcctaactcaaagaacatttattgagagattcattttccaatgaatgttcctcctgaaataaatttactgaaacataaattcattttgattaatgtaccaaccagtgttatgcatcaatttgcctaatgacaaattattaactttttgaaatgtgtttatagtaaatatgtttaaaatttgtcacaaatcactttgtatactgttgtgtgaattaatagttgcaaaagactggattttttagtggcaagtattaagtttcaatttggtattaatatttctttacatagccatttcacctcagatattttataataggattacttatcagttctactcagcgatatgctaaatttatcatgtgtatttgataactgaatgtagtaactaatgctttttagccacttaaaacagaagttatgtccaactgaactaagtaagaaaggtatgaattgagggtcataaagaattaagttgataaaagatgtatgtaaaggagtaagccatttataccatcacttataaactcataagtattcaagaagttcctatataatttgatctaaaataagtattctcattccaggaatttactgtaccaaagaataaaataattctcagatacaatctggatagacaaaaagcaagattgcaatccatttcatgatgaacctttaacttgtcaatcaatataagacatcaactagctcttcaaagctcattagggctggttatttagtacagataactgtcaatattatgcatgatttaaagaaacaagtttgagtgaactggtaaatttgtcatttgacaaaacgagttgacgtttggcactgtaaacctagccttctcattccatcattaccatctatgcctggaacaggaggaggcagtatgtggcacagtgccaggctgcaatggtagaccatccctgtctttggaataagaggctttttattctgttttgttttgtttgtctctttatgtcaggggtatcctttaactagaatttggaccatgttgaagttctatgtctctatgtgtatttgtgtgttgttccatgtatggaacatagctaccatggactgtttgctaaaccaaagagattaaaaagctctggatgagaattgaaatgttactttttacaatcctcatgtctcaccactacagggaatatgttctgcatgagcacttgaacaaatgaatgaatatagcaagttgtgtaacaagttcttggtgtgtgacaagaaaagatggctttgtgctcaagtaggagcagatatgaaattggattagaggatctcactgtggcattgcaatgcagctagatattctaaacactaattaattaattagttatttattggtgtatgtccttaaagtttcttaattattaccttcaattgcagtgctgttagatgtaggcttaagtatatttctctggcacttgctgggaggcagtttgttactgaataaaaaggggtcccttgcagaagactactgaaactttcctttcttttgacatctaagaaactccaagtcagtgtccttcgtttagaagaattgaagtgggaacttgtgctcaattcagagatttcagaaataaatatattccccaatccccaattcaaacatcaagcttatcaagcttagttagattagtgcccaagcacaagattatagtagccacacaataacaccctctcccccccacccccgtgtgtgtgtgtgtgtgtgtgtgtgtgtgtgtgtgtgtgtgtgtgtgtgcgcagtactggggttcaaggctatgttcttgtcctagacaactgccttacaactgagctcctttctccagcccctaatttagtcattattattagtcttagctgagctatacaaaaaagaatagacgatcaccttcttaggcactgtgagctgctgaaataggaatgaagactatttacaaggatgatatatcatggaagattattaactgggttaaaaacacacagcatatgcaattagtgtaatgaaggactaaataacagttggtctgtcaaacatctaccatgtcatatgttgagcctggtactacgtatggttgccgataaaagggaaagcaagacaaggcctctcttggactttagggatcatatatgtactattttctcattcattttttcctagttatacaactttggtgctgataggagtatttaattaattactatgtactttttccatctatagaaaagtggaatgatagttgtttatttctcacaggatttccagaacgatgaaaataatattcttaaattgtttttctagctgccatttgtttatttttaacattacttataattaaattattaaataaaatattgcctgattagtaactggaattactaattcttcctagaataatatttttctgtagaaaatttcagtactaggccgggcgttggtggcacatgcctttaatcccagcactcgggaggcagaggaaggtggatctctgtgagtttgagaccagccaggtctacaagagctagttccaggacagcctccaaagccacagagaaaccctgtctcgaaaaaccaaaaaaaaaaaaaaaaaaaaaaaattcagtacttactaagaaaacttagcagaatatcaattgagtattgctaagctcaaacaaatttcaagtgattaattagtgatgaagtcagacaattacatttaggctaattacttattctagcattttctctatgaaagttaaatatatgtaagtgtctgtctaacaaaggaagtataacagggccacctattctaagaccacatgggcagagcactggttctgaaactgcaattctgtgaaccatttgtactttgtaaagcaataaatgatatgttaggaggttcagagcagtagcaaaagatttgatttgctcatttcaatttagttaatccttgtttctttattttaaaaattaggtacaaagtcttttgaagcttaaaagggaattataataatttatataattgaataagaatttaacaattgaaattgaagtcacagtcaaaataaaaatacattcttaatgaatgccaccattgcagatggctagagcagacaattatacttttacagaattttaagtattaaatacttctgagaaggcatggaactgttttaacagggtcttaaactcatggtctttggagattcacattcatgttcaatgaattgaacatcctttgtgtattaggcattgtggtgtatttgtgggtgatgaggtaattacagtccatgtgctcatacagtttgttctttccctgtcaagaggaataatgtacactatacaatatgctgactgctacagggagaatagtgacatagtgctacaggaacacctgggagggccccaggctggacttgttaggtggaaagggaaggagtgacagctgtttgggaagcattaaggaagtagaatatattctagccctagatgttgaagatgagagaagcgaggaggaaaacaacatctgaggcagaataaactgttgtggcactgagggaaccccatctaactagattgtataaacttggcatgtgtaaacggaagctgcatgctaaagagcctctgaagtcttgagaggaagtttgtagtttatcccaaaagtagagcttcaagcatctgtgtggtaggatggagatctaagaatagattttgagggcaaattagagcttaaatcattggagtaggtaattgattaaactgggaggaatacaagaaaagaagtctgtctcttatttgtaaggttctttgagaaatagagataccaaagtagctagatgtcaaggtagtcaactcttgtttgaatggatcagtggtcttaaactcattgagaaaagactgtaacttccacatctcataagaggagttattggcaggaatttaattgattcctgcatggattttcattcttatttaaaatgttgtctaacatgaacttctgtcaatcataaagaattgagttgattttaaacatccacttctttctgttaggggcattaaacatttataaaatgacataagaaatcactttttgttttagtactatttaaaaaagagttttaaaagaaattatagttttgaagccaagaaaatactttagactaagtcctaaggtcagtcatacagagactttattgccaatcctcaaaatgttagcttcctgagaatggagtaactgcaattattataatttttttatttatacaaagaaatattttctacccatatttatttagatactaaatatataaatgatattttgaagttggctaaatacttcagtgtattccaagtgcatttctgtaatgaaagatgatataaaccttttatttgattgctagcattgtgttttgcagctgtgtgtgtgcgtgtgtgtgtgtgtgtgtgtgtgtgtgtgtgtgtgtgtgtgtgtgtgtgtgtgtgcgcgcgcgcgtgtgcgcacacatgtgtattggaagagggttttttttgggggtccacccactctgcccactcatattcacttttttttgccaaaaatgtcagcgatgagaattgagttcttgaagatactgtacatttaaaatgggatatattgttcccgtcattagcagtgttattatacagtattcttttccttttttagatggtgttgatttctttgagcctgtcattaaaatagttaggaactgtaaaagagtctattctcttctttataaagagaaaaatagatggggaaaattcttgtgtgggcaagaacatttaagaggaaaattgtcattggggtgtgaagaaaagtaagaattcctgttcttgctttatagtcactataaaaggcaagcaaccacagtcttcctgtttggggacagtactacaggcttaattctccagtggttcttttagtctctgtgccttttaagacaatatttgcctttcctttgtttccatcctaacatacgggtgctctactaggcattcgtattcttggttatcaatccacaacatgagataggatgcatccttattgtgtggggcaataaaccacatacaatgggcagagaaaccagtggcagttttgaaatgagatgcttgagggctggagacatgtgggtgaaatttacagtactaggcatgtttttttccctctgtagagtgggccttatgtcagtcagaaagtgttggtcaaccccataacattcctgccacttttgccccctttggcatatcttcccacactgttcattattgtagtttatggggtgcacagctaggtagagtgccaatgtttttttctcttagaataaccagcatcgtaccttccattactatgaaatctggccaacaggcaaacttccagttccctaacatcttggttttgccaaatcctgtgagccaaaatgttcagtgtcttcagtcatagtcatactttcaaattgtgggaggacaacctagagcaatggcaacagcctatattgttttagggtctctgagacagctcttatatgccttcttaagtaaacaattatagcctggagatatgaaacattgtcctgattgtatccttaaagcatgatgcatacccaattattgtgatatatttacatgttcagatatataattattttagtgcccaaaattttgactggccattattatcaaattgagatagccttggacttgaatcctatagttttgtgttgctagtaattattaattaattaaacttatttgaactccttagacttaatttccttgtaccataactaggaatatgtatttcatgaacaaaattagaattaaatatgcacaaatcattgatgctacaaatgatcaacatagtaacttgtcctagtatctgtataaaataatgataatatatttatggtaaaataatcagtgtttgttttcttttgaattcctagagttattagtttgatagattcaagttattctgaagattgggctgataaatagggataatatattacattgtctcaaatttttgtaggaatctctgtgtaatatgcaattttgttttcagagacaataatatagttggcattctcagggagtttgtttatttggctttctggctacttccatccccgtgtccccaccactgttagctggacactgtgttcttgtggttgttatttggactctgccatctagacagggctgatctgactattaattcgtgaacacaagtgagagaaaaagctggaatagcacctgtgcctgatgacagcttctcttgataaccaggagcaaaacaaatggcaaaacaattttcacatcatttcatcactgtgccttcagtgttaatggatggttttattttacttcttaagtaattagtcctttaagataaaaacagttaactattttttttttgtatttcatttttgaagaagaaacaatctattctgagtcataggaagaattaggtaaatgaaagcctttgttgaaaagtgaaaaacgttacccaggcaacatgtgtatgctacaactgtgctgattaatcatctccagcattaatcattgtcaatgattatcacaaaaatagtagtgtatagcagaacagtctacactactgtccttcatatttggcataaaagttttactttttcctaagaatcacaccatcaaacttaaataaagaaaggctctcatatagaaagtcataaattttcttctatacaattacattatctgttgataatgtaattacaacatcaattacattatctgttgatttgataagattgcattttgcagtgtgtaaacttcccctagatatgatatacatgttgttatttatttgttttgtttttttgcttttttttttgtttttggagaaggtttgggctatggctgaagtaaacagttcttctagttagtttcttcttgggtagagaagtgcaaaatcaagccttctgttttgtctgtgtaggtaaaataatcagttcaatatatcttgttaaggtttaaaaaatattgtgtgattatttcatgcatattaaatatgcatacatagaccagttcaaatattcctattttgtattatgccttttttgaagattagtatccttatttgttgaaagtcatcttttagttatcaaccccagagtaatcaaaatgtagacattcacacccattttctgaatgtaaatgttaacaatatttttctctaaaagcaatgctcactttaattattcatctccccccactctcatgctctctctctgtctctctctgtctctctctgtctctctctgtctctctctgtctctctctgtctctctctgtctctctctgtgtgtgtgtgtgtgtgtgtgtgtgtgtgtgtgtgtgtgtgtgtgtaagccagaaaaatgtgttgatagatcccttggagttggaattaaagggagttgtgaactgaccaatgtgggtgccggtacccaaaatctggtcccttgaaagaacactaagcattcttatccactgagtacctctccaaacccattatagccataattttagataatggaggtttaactgaatttgagtattagtaataaaagttttatgtttcagagtctttataatggttttggttctttcttcatgtaaaaatatactaatgtcaaactatttgttctctagtttaaaaatagttagttacaattgtgaaatagtggcttctaaaatttttataatttatatagagtatagccgcatttatatatgatttatttttaccaaaaactgtcataataattttggataacttggtttaagcagcaagtggaattaccctcttggtctttctatgataaggtaaaaggaagagcaatttgaaaaactgtagattgttatcacaatcttaactcagaaaattaaagtcagcttaatggaatgagaaagagacatctcaggctttgctttgtgggagaggaagtatttcaggatggaagatcacagtaagcatcaggtggacccagccagttataagcttataaagttctgtttgataagtgattgactgggtcagattattaaaggaatgaatttggcgtgtacattgtatgtgataaaaggaatccaactgtgaatttgagtgtgttaaataattttcaggaagtcccccaaaggacatttgaatgctttgaaacttgcaataaagcatgtttgttccaaacacacttgatttgcctaggtttgcccatcaggttgaagaaatgctaatttgttgcattcagcagctgggttttgcaatattcttctcctcttcctaggggctaattagccttctttcaaaatgtggcctatttagccttagattctcatgactcatccagagctggctgtacaaagcagaacccttagcaggcgggtgtgtccaactgcttaattagccagaataaaaaggtcctttgtcaaacaagcatctgttgctcatgacacacctgacagccacattaagtaaggatgactagacggaaattgtgcatgtctctcctgtaagaacataccactcatttacatgtggaccacatcagaagcaaactgcagggggttatttagcttatcaaaagaaattaatgtgactccacttgtgattgataaacaaatattacttaacaggcaccaaagggacaaaactaaccaaattacccccagacataaacaaagccttggaaacttctgctggtgaatgcgaatccgttgtaagcgcccagttgttcatttccctaaggtagcaggctttggacattcctgtgatgaacttcactttgtacaatgttggggattccacagaatatttttatatatcagtaggttaaagtaatctatttaacaaactttgggtagaggattatactctttcagtaggctttatattgtcattgttctgggttaagattagctttcagggttagtgaatgtaaagtggttctagaaaaatacttataaattgggaagaattattgcttcagtagaggcaatacttttgtatctttatggacagtggtggaatggatctatatctatgattgctggaaatgtacagtaagaaaacatgtattagaaccccaacttaccgttctgacttccagtgccccagctttttgtttggaaactatactatcacgagtctgcatcacagtacacccagtggttgtaagtgcagattttcaagccagacagatgtagaatgaattcagtttcttctttctggctgcatgcttctaacaattttaaaatccacccatatcgaagtttccacacttgttagataaggataacatctgctacatgtgcttcctttgagaactaaaccagcaatttatttaatgcagtttgactggtttttagcatcaggaaaagatttagtaaatgatagaccaaattgtagttacagcccttcaagccattttatggaagtcatgaggttgccatcaagtgtctcttcttcagggctaatggaggaagagaaactagataagaatgaaactgcatctgtcagatggtctgcagagaatgcccagggtttaagagcactggttgttcttgtaaaggatgttcccagcacccccatgctggcccacaaccatccataactccagttccaggggatccaaaaccctctttggacctccttgtgaaccaggcatatatttggtgcaatatagacataggtgcaaaaacactcatacacttgaatctaataattttttaaaaatctagtcaaatgaacagaaattacaattagcagaaagtactctggggtttgattgatacttgggtacactagattgggttctttatgccagttttaatgtagcatagacagagctggaggctaaataagaaatttctctcttactctctagctttaaatttaaaagcggtcatttctccatgcttgtttagattactcttgttgaatagttgacatattttgcttcctacattgtttccttttttaaaatttctgctactgtatgttattctcatgttacctgggcactgcatattattaaacctaaagcttcctgtgatgttgtgtgcatgaactttattctgacatcaaacctttcttttctgtttcctacgtgtgtggtagtgtgtaagtgatgagtgatttgacatctccaagcctcaaactactcacctataaaatggagaacatcatagttttaattgttaatgcaaaatactggcagataagtgagtcttggcaaagtttccagcttgctctgtggtaaacaggagggagtattagtgcaagagacttccctgtggttacccaggctttattgttgagaaagagtgaaggagaagcactacttggctgcaggtgacttctgtatctgttctccaaacaaaggtacactggtcaccctggagcttgtgagactgctgtgaggacagcagatgctatccagtatctgctccattcctgttccttccacagaagcaagccttacatacacatttagctcctttgttagaacacaaaatgtaatcaatattctgtatatacttaataaatcaaaggacctgaaaggtttttgctttcatttttggattgctgtctttctccctatttgtcatggaagaaaaaaataaaaggaagagatggggttcctaatttatgtattctctttaaagaaaagataattttgaaggggatggccagtgctgggatctaacctagggataattaaacactctttcactgagctataacccagctttggctccaaaatgtggagccttgatgtcttccatgatcctaatcaaacaagaagttttgtataatgaatgatgtcattctcatttagtcttagatatctccatggttataatgctagtccaaatgcacatttatttaacacaactgtcacatttaaaagaactacaatttgtaatatttcacataaaaatcttgatttttttcagcttcttttgacaatcacagcagttttctacaggttggcctcctacatatccagaaaatcctagagctgaatgttagcctatctatgtaaataatgctttagccaaagactttacctttcaccctctcttccttcttcagtataactaacgtccctcaactaaaattgaatgtaaggttgtttcatggattaatctattcatgaataaatgtatttttgaaaaacactcagaagagccctttacatttcttgaacaaccatggcaactgttactactagacttttgtatgtaatgacagttttgtagttttaggactttgaccaagaaagcaataaaccactctagagaaatcactcaggtgaaaagcacagccccagcttttctctggtcatgttgactagatttcttaacccttgcatttataaaataaaaacagatttgttgtttttcaaggtccatttctaaacctgaataagatggtggttgtggaaaaagaattagattggtcacactgtgacaaagatattgagtagaattaattttctcctccatagaactgaatacttgaaaatttaattgtctcaaggaacataaatgctactgtgttcttcacttgtttaaactacaatgtattacttttcataggctgccgattaaatagtgtcccctacctttatccacataccagaaaattcacatgtattttttattgtatttgtaagtagcaaaagaatgtatcaaactgtagaagcctaagaaaatcagaaaatgtgattctatggctgaataaatacacacacacacacacacacacataatgtttgaataataactttaatttagaaataatttattctatattctgcttctttttttcattctaatagccacaaaaagtgcctagaaagtatggtatattatatgggcatctatttcagattgtgtccagagatttgagtatcatgaatattttagatcatagttcactaaaggattgagatacattgtaacagttgggatcaaagaacaatagctttcagtgaagtgctgcctctttactctcaggtcaagtgatactaataaggatttttacaaaagtagacctgattaattttactaataattgtttttacatttttatttagttggaaccgataaaagtcactaaaaccatgcctgaattatcgtgacagtgtgttggagttagtggcattatatgtttggaagctcagttttcgatattaggaacaattgcagtgaagcttatgatgcaagggcaacattgtgaactgttttcctgtattccagagaccatcatgcagacttcagagacgggtgcagacacaggttcgacagtgactctgcagacatctgtggctagccaagcagcagtgcctacacaggtggtacagcaagtgccagtccagcagcaggtaaggacctgttgctttcagagagggagtgttcattatatcgtctaatagagcttacttcaaagatgattaggaatttactttcttgcttcctggaggatggagataggtatagttcatgcttctaggttagctcagcaaatgcctcttaggttttccttggtgtgccaggtcccttccttgctgggctgtagaggtaatgagacacacatgcagatcatgttcctcttttcagagcttctcctggctcttaaagggaggtggctttgctgacctgtccaccttgttttctcctcctttcttcccactgcttactagaaattccaaactctcttatattgaaatgctactaatgatatttttacatagactgagaattgtacttagtagtggagggcatgattattactattattaaaaatttattaatttttatttatttatatttatagattttatttaaattagaaacaatcttattataatattctttataggcaatattcttttgtctttgtggtgttttagaaattgccttggtactagttggctgttaaatactgtttaatgaaaataaaattatcttaaagggctggagatctgactcatcccatttaaagagttgcaaaagaattaatcaccagatgtttagtacagttcttattcatgctccgggaatttggcttgttttggaaagatactgacaaagtaatgctgttcatgccaattaaccattctgcatgtggactgtgagcaccctggaatgcattttttccaaagagtgacaagaaattgcatatttcaatatactagttatgtttatctttctctgttacttctcccctccctccctctctccctcccccccgctccctccctccttcctttcctctttatttcactaccactaaaggaacctatacaaatagtgccttaaaagccaatggagttactgacaccattaccaacttcacactttaacagtattcagagaagtagggcttgctccacagaataagtaaagaccagttgagacaatgttctgcatttctaactttaaaaagttaacaccaattttttgataataagcacttgcttagcagataaactctctgggtgagttttgattctacccacagaaaaatgtcacttcaaatgaatatagaatgtgccagaggctcccaattccagaaggtgccctcttaagatggtggcaagtgtgtactgtgtatctgaccctgaccctctgcccttgtccttcttttcttcctgtcttctttccttttttttttttttttgctttcagagacacttttttcttttaaacttgtatattgttcagtgcttgctatagtttataaagagtgtatgtaatagtgaaaaagagccagattattcagagagttagttactgaaatcaatgtagcagaacttagttttccctctttgtgcatgtaccaatcctcaaagggagggtttgtcttttttaattcattaattttatatatactttcatggatttaaaaataccgtattcatactactttgttatgttttgaattttttgtttagcattatgttaacatgtttcatttgggtatgcaatatatgatctctcttcctctctcccgcccctcacacacacacacccccacacatacttcccattcttcatgctgctaatatttgagaatgtattttctttgtttttatagtattgatggtggaatccaggtcttagttctttaccaacgtgtatgtctgcagccttcttgtgatatattagcagaactgaagtctctggtgtacagaacagctatttcaagtactagtatttgcattttaatgtggcagagcagtatccagtttttatactactctgtaaaaatgctgctaacatgtatagtaaacaaagatcactttcctttcctgtaaaattcatatactttgtctgaatttaatgatgtattttttctagtttgcgagattgatatgctctaaaagattaaaattaaaacagtctggaaaaatgactcaatagttaagagctcatatttcttctgtaagactcaagttcaattcccaccacctacataaagtgctgttaactaactttcagcctgtctttggagggaccaagtgcctttgccacatgggcactaagactctggagtatatccctcctctcacgtgcacataattaaaatgcaaagaaatctttaaaataaaggtggagatgtacaaggggaacatttttctgatgtctgattatctgtatgcagactgtgagatgtttttaatttgaaaattttcagaatggaaatttcaatttcctgaaatgttatggtgatttgctcaaagtagttggatttccacacattgtgctagaacctgtgttggcctttttttcccctctcaactctgggttctttaattctggaaatcttccagtttttattgatgactgctttccttttgttttctctttttggtattgcacactttcttgtttgacttttatctttttccttttaacttgttatttttactgatcagcatgggagttttgacctgcttcgtttccgacctgggccggttcatctttccttaggcaacctggtggttccccattcctgggaggtcaccatattgatgctgaacttagtgcaggcacctgattgccatagagcactacagcccagaactcctggactcaagctaacctcctgtctcagcctcctgaagctgggactaccggcgagtgccactgtgcccggctaacttgttatttctaacatcccacttttattgaaaattatttgtatttattcttataccattatgttttattttgaggttcttatctcctctctctgcaggtattaatctttttatatagtgtgatgtagtagtgtgtgatgatatatacctataatcagaattgtgttggctgatgcatgaaaaacagaagtttgaggccagcctaagctatgaagctataacctagttctaaaacccaaattaataactaaaatttaaaagttactatagtattcttgcttttaaaaatgtcttttgtttttgagatgatatttatatgatttcccctccccttcctttccttcaaaccttcctttatacccatccttgacatctttcaagtccatgtcctctttttcactattgatatacttatatatttatatgcatatataacctgaaatgcatagatacaacctgctcaatgtgtataatgttacttttatatatgttttctgaccatttcttagtggataaccaggtgatatgttcttccctgggcaagactggctttcccactctcaccatttcacagttgcttgcaattctttgtgtatagttgaggcattttagtcttttctctgtccactttagcgtagaagtttcctttatgaagggtaactatacttatttgtggggataaagacaaatatttagaatgtagttagggattatgctggtttaataaagtagtgatagagtctccaccaaaatacatggcttcactgaccttagtgggctaaccgtggtttcccttcttctgattgggctttatgttcaattagagggatgttggttattgtcaaagcatctataccactattgcacctttagggttatgatgccatgctggtaattgttgtggttcataggtatcataaataggtaggattattacttgctgtcttcctttggaagcctgcatgatgctttctggtaactagtcttcagggatggaggtttcaggtcagttccatctcaggtcctcttggatctatatctgaattgtgtggtgtctcaatagtcagtgttttctctacttctagggggtgcaaccaaggccaaaagcaataagaacagcagactgtagtgttttggaagtctcttgaacaactctaccaaaaactcaaaatggtggttggtcaaatgcttggtgtttggattttgtaaatgttctttgagtcttggagggaacattgccagcccaggtgagactttatttaagccttatatgtatatttatatatatagatgtatataaacacacacacacatatcttgtttttatttaattgtaatatatttccttataactattcagacatccttactgttactttacccttctcaccttttcttcaatatttttcttcctcttcataattagataccccatttctctgatcaaatcacttgtatcttctatttctctttctgtcatttccctactcccttaccctggtaataatccctttttacttccctggcttctgcagttactccaggatatgtatctacatcggaagatttgttaactaggagcttctgatgagaaagaccttgtaacatttgtcttgtgggtctggtttacctcactccatattatcttttttagttccatccatttatctgaaagtccatgattttttctttatgtctatatagtattccatagtgtatatgtgccatttttcattatccatttgtgagataaagaacatttgagttgtttccatttcctaattgtagtcattagagtagaaatgaacatggctgaccaaatatatctggagtaggctgttgagtccataaggtgtatgccaaggagtggtagaggtgggtcatatggtagttttagttttagcttttggagaattctccacactgatttccatagtgactacacctgtgtgcaatcccatcaacagtcaataagggaacagtgaacgagggttcctttttcccagtatgcccttcaacattgttgtcaattgttttgttgatatttgttattctaattagggtaagatgaactctcagagttgttttgatttgtatttccctaattgctagagatgatgtgcagtttttgaaatatttcttagctattttttccttcttttttggaacattgtccaggacccaggcccattttttgaataggtcatttttacaaattgtgttttgagtcctttatgtattcatgagatatttagctggcaaatattctgtcccattttgtgtgcttcttctttacccagttcattgtttcttttgatgtacggaagctttttagttttaggaagtcttacttgtcagttgttgcttttaattattatacaaatgaagtcctgttaagaaagtctttctctacatctataacatatagggtactgtttgtgttttcttctaggcctttcattgtttcaggtttcacatttatgtctttgatccagttggagttagtttttgtataaggtgattgatgtgggtctacttttgtccttcggcttgtggatatccagttttcctagcaccatttgaggaagatgttttcttttttccatcctgtgcttttttgcatctttgtcaaatatgaagtggctgaagttatgtatactcacatttgggtttttgttccattggtctacatatttttttgccagactctctctctctctctctctctctctctctctctatatatatatatatatatatatatatatattttcatcactgtggcacggaaatatatcttaagatctggatagggaaggacactggaagtagcaccttggctagatctggcaggttatggggtataacatgaaaaagagccactagctcttacctctacctcagactgaaggggtgattcctggctccacaaatcttcagaatgcaatgtcccgtcccgtccacaaatcctcacagaaaatagctctcgctctctgaaaactatatatccacatgagaccctttgctttttccttttatgcctccctagtgctgggattgcaggtgtgtgatcccagttgctgagatctactttgtgtgaactgtttctctttaggacaggaccaatttcatgtagctcagtgtggccttgtactaacagagatccacctgcctgccttctgagttctaggattaaaggtgtgtgctaccactgtctagctctatgactacaattatgactgctaggattaaaggtgtataccacgactgcctgacttctatggcttatgtccagttttgcattctgaacccccaggcaagctttattaaatcataaataatatattaccataaaggagggtatatggatatggaacatcagggagactcaccaggctagatcctgaggaaggatgtcagagtggttggatgtagcatagaagagacctgtaggttgtggctgttaggagagttctgaactggactcaggagtagggtgttggagatctgattggtggagaggtttaatttagtgatgcttggtttattgtttccccgtgttttgtttctgtctgtagcattcatattaaaatatttgttcaactgtcgataacctttgggtattttttcatccttaaaatatgtggagccaggtgtaatccctcctcaaggaagtgatgtgggaagattatttattttgaagctagtctgggctgcacagtgagttccaggctagtgtaggctgtcttattagatcatgtctcaaaaaaacttatacataagaccaaaccaagtaaagtagaggtatagtaagctgaattgaatgcattagtgggtcttgttgccttcaaactgatgtcatctgactgacatatactttagaatcttaccatgttctttttggatagctgtatgtctatcaaaacatcattcagcctcctacataggggtgaaatgaatgcttggttgaatgttgggacttgagtaagagaagacaaattgtttttattgcattttatttttcttttctatccctccagcccaatatggtatccaaggtgattagtcttcctcagtataggtattgaaccaagcaagcaagcaagcaagcaagcaagcaagcaagcaagcaagcaagcaaaagcctttaaatattttaccaaagttagggaacatctttgatcttactacgtggagtttataggattttattgctttttaaatagaactgctttgtgtgtgtgtgtgtgtgtgtgtgtgtgtgtgtatgtgtgtatgtatgtatgtatgtatgtataaatttaacaaaaacaaaagatggtaatacatgtctgttttcttggcacctgaaaggctgagtacgttaaaggccagctgtagtagatagcaaattcaaggccaactgtaggacataaaaaaaaaaaattctgtcacatccattccaccaaacagcatgcgttcgcatgcgtacttgtgtgtgtgtgtgtgtgcgtgtgtgcacgcacacacacacacacacacacacacacacgtacacatgcatgaatacacagaaaaattagtctcttgtatgcttggaccattctttagaaacccagaggggtggctcctctggcaggcatatttttctgttcctcaagtgctttcctctggggtgttcaaggcaggtgatactttccttttgcttgtaccaagcagagaaggtgagaattctcattttctttttgtcaacattgttttatttcatatagttggctagtgttagatttgcttggaaacacttgttatatctttctactgggcctatttggaatgatttttttctccttcgttacttttgttttcttttcttctctttttcttccccttcttctcccctggcctattagaagaatttccggtttgaagttccctgatgttgtgcttgtgggataccaccatccataactgataacagtagtactgtaataatttcctgttaatctaacatgcctgtaatgtttgaaaatttaatgtttcttgagtttgaaaactgtattagaatactgttgaatgcttttatcatttatttgtgaccccggtgggtattgatggatactgaaatcagagtattaatgttaaagatagttaattctattgatttaactctttagtataacttgattagaatgaaaactttataataccagtcttgtctttaaaaaatactgattggaccactaggtatttatagaattatgattagatgtggactctttgccctcaaattatttctgtgccatttgttgttctactttgagagttttttgttgttgttgtttgtatgttttatagctttttcttcacggctgtcattttatgtctgcttctaggagatcttctaatcctcccaggcctaacagaattaaacttccaggagaaggaatgtgtcttcctataaggttcttttaatggtagaatcatgacaaaaaggcagaatttcagttcttcttctactcctggatcctagatagccacagctattgctcacattgatgatgatctcaaaccattgggactaagactcacaaaagttcccctccttcaaatttcccaggtacctttgcagctgtagacctcttactctgtcttaccttttctgtggagaaaggcacatacacgtcttttttctccccaaatcagcaagcagatcatctttttattgtaccttctagaggggttctagtgttgaggcttaaggtgagttcatgaaaaacatacatacatacatacatgcaagcacatatatagactaggctggatcacctgttctattatgcttgttactgaggtacgccatgtttaaaaagatagagaagagtgagtcagcacattaggaaaatgaacaaataatattatcctgtgaccctatgttcatatttagtgtcataaaattagctttaggtttaaataaagaaatcatttgggcaacagtgcaagaagtcttgtactttattctatatagtctgaagaagtccctattactttaggggactaatctggttcctataatgggattagctctaaggggtagccacaatggctgacctggcttgggggttcaggctttttttttttttttcttaaatacaaggtggcagcaggtttcacacaaagccaaagccctgtaccttacagccttgaagagctatgtgataggtgaggtaacacataacccttgaatatttaacatgtttatgtagagtcaggaatcaaggagggatctcattcaaggtgacagacagtgagacaggaaattagggaagacatgtcaggctttcatcctgccttttgttatcttgtgggctcaagtgaagtatcaatgcctttttagcaaaaatagtttctaaaatacctgtcatattagagcttatcaaggacattttcccacagggaatgatctttaagctagtatttgctaagatgttaggtggactaaaagagggtttatgttgttatttattttgattataaaaaaagaaggtatagtcaagatgtttataagacagggtgcaatgaaaaggagattaggattaggaaaaggagaacaagatgagttaagaaaggcagtacgccatcccatattgtaccaccagtgacccaccagctagagacatcaagctgtcccttccatttctgaaaatctgtctggagctgtcaggtcttgccctttactatatgcagttggttgaagcaactttcctccctgaggaagaggcagaggctacccatctccactgttagtagattcaatccttgctgaatttgtagcactgcattagccagcaagtctatttggctctggagggtgaagatgatctgcactggaagttctgaatgagctgagaggaaatctgatagtatagttagggaagtagttctgctgttctatttataaggattcaggcattatgcagaccctgccccctgaccataggcaggatatgcacactggcattcaggcagatacttagatagctcaaagggccctgtgttgcatggctgcatcatgtgttacgtacctacttaaggactctgtgtgcatgtgcaagcttttccttttaagcaagagcctcccacctgtcccccccttctggcatcccttatccctcttcattccccttccccttccatctctgttcccagttggccaccacccacccctcccttggttccctttccccaataaaatccatgtaggttttattgagttttgtgttttgtctttcattgaccacagctgcagcaaaacaacaccattagctatgtcagcacttatacttaggactgtgagaaggggtaggacctgaaccatcattgtcatgttgtgccactataaactttgtgatgggaactggcaaggattcttctacaggtaccacccctaagttaaagggcacaagtcccagaccactcattgggtaagcagaggtaaacctgagtgccacagaggatcgaggcattgtgaacatttgcacttagtggctgggtggtggcgctcagggtcaaggtgttattgcaatctgaggaatccagtgtgctcacaaagtatgtcccaagggagttaaagcagtctgcaataccagagagaaaaacaacgtaggagagataagtggtggcagtgatatttgactcacagcagttagtgagcagcaagctgagattagactaatgtctaatccattgggtgaggccatgaatggtggtcatgagattgacctgggagggacacatgactagcattctccaaagtagacaggccaagctttatacagtagctaatatgtacgttctgaaacacgaggacagagaggtgggatcagtgttgtccaagaggggagacattagggaagtaacaggtttttatgggtgttggatcacatcttctgtattttcctatacctagatgttgttagtggttgagaaagcctctacccatcttgatactgttttgaccagtaccaaaagctatttgaaatgtctaatggtgagcatgtgggtgaagtccagctgctggtctggttcagtgagggagccccttgcttgataatcgaggaaaggaagatttcaatcccagagatgggattagaagtttgacaaatttgacaagaagcagtgatagtctttagataagatagagcctcagaggtgggctctaaacagattttaatgaactgagacaaagcctcactgttaggtgaaagggctggtgcagataggatagaatgtgtccagtgtctgggcatggtggtacagatgtgggctgtaaaaagagggtttcctgtggcatgtgagagggatccaggcctcccagagccacagctctagctctcttgttggctcagttattttccttggagatgatggaatcatctgcttgatgttgattggtggtgggcacttcctggagctgtgggaagatgggaaccctttgggttggccataatttcgtctgagttggttattgatcttccctttgttgctagtagttcatactccctccagatgactgtgtgtgacaggagaatatgtaaggtatattgggagtctccatgcagggttagggattgccttgttgatgcttgaaaggtatggtaagagccattagtttggaccattggtttgtggttcagactgggagtgcctgcacctcaaacatcttggtgtcagaaacaatagcatatcctgcgtttttcactccctcctgtaggaaggaactgtcatctgtgtaccaagtgtaggtagccctgaggtagcactcccttgtgtatgtgtgtggagtgaggtagtagctcttctagggttgcaatgcaagagtgaaatggggagtatcctgggatcggtcagaggaggagatttgaaatgtggagaggtgggcatgactgaaaggtgtgtgtggtgtcttccatcagtgtggtgtcctctgtgggataggtgatgacaagagaagacagtatgatttatgagttctactgcagtttgaacactcagactaggtgcccatccttggatagtatggtctatttccttttattttttctttttttgagaagtatgtgatgggagcaaaggaaggtcactattggtaacccaggaccctgaggacactttcccaccttctctgtgacctagagagagaaggaccatgtcaaatctggaaggtacaaggctggggcctggaggaggacctgttgaagtttatgaagtggcataagggtatcctggcaatcgtgaaccaaacaataccacaaaatcacaccactcaacaagcttcacacaagcaattgattgaagataagagcagactggcagctgcctctgaatgggaagagagacagcagaggctgggtaaagggaaagacttttatagggtttgtggagcatgttcaccaagcttagtggaaaagaatcatgataggaaacgttgtttggctgtttatacagtcatgggggtgaggatttccaagtcttggagctccaggccaagccagggatcatgtgtgttcctcctttggcacaggctcttggagtgtagtcaaggtcagggtgctcttctcttgacaccttttcctattaccaccataacagaagctgccatctactgaatatctagcagttgttctttccttccactgaatacatactcttatttctaaatttgaaacaactgtgtatagtcgatagctttaacccacattcaccagccaaacttgggctcaagaaactgaaatcacttccttggccatgacagcttgttctgcctttgagaagtgtgctctgaaggtatccttaccaagtgagtcagtggggtcaagtacagttcttttaagattgggacagctgtattatccacttagcaaatacttattttatggcaccagtaaattcttcccaagtagtagtaagtgcaggaatatgtagagaaggggtatactaaatgattaaaacattgggatggttggaagagtggaaggggatgactggctctgtctggtagatgcctctttctctgcataacaactcctagtgggactgtgtatggatttaggacatatagtttgggaagcatcacctttccttaatttttttttggggggggttagtcagatgaattgttcagcaaaattattcaagcaaaattagatatatcaaagaatcatagaaggttagtttgttagaaaatgagcatatctttttatgcatgaaaaatgatggctttgccattccttttatccaataataattttgttcaagatgcgtgtttagggcagacccatatcaccttcttgtcatgactgtttagtagctcagtgctgaatcctgagttttatggttaatacatctcatctcagccctggattttttaaaccaagagttaaattcaagtcatctggcttcagaactggagcccttcagatgaataacaagataaactgttaatcaggataaaccaaatgacacaaaaggactaaacatggcagctctgtgtaaaagagcataccatattttatgtcaaggattaattctagttctatcgatctccatgcattttgagcaatccctttagctaaattaataaagtaaatgagaacaccaggaatatcaagcattatttgatcaccataagttcagataaaaaataggaagcttgaattttctacacccaatctaaacacaaatcctaggaatgagcatcagtatatccagaacattttaaaaaacatccacaataaaatgttaacccaaagtaacattttagaaggatacctaagatattttatttaacttatttgcagtgagaagactcctgggcattcatattctgactcctatctgtcattgccagacagatttgcatagatatccataatatcctgactttgtgggatgtaatgcaagcagttaattggagtgctagggagccccctaggtgactatgtaaaatagcacacacaatatttactatatacatttattaaaagagtgactgcctttagtcatgtctactgtggctcaacaacctcagtgatgccacttgacaatcttctttgatagtagtccgaagtgctgagtctgcaaattgaatattattttggtgcctaaatacattttttgatttgctaatcaagtttatcttagacccattcatcaaggcagttagtattgacagtctctgctctcatactgacatttcctccccagcctctgtcctctaccaacccattacttttggcttctttagcaaaactatttcccatcacttgctaatttatgctactacttctcagatgtagtccagtttatctttcttaagttgatcgtctatttaactactttctcaagattatacatttattagagagatgtgtttcattatttaaatttctggccataagtaaaactttatacttggttaataatttatcattacttcactgaattgaaatttagataatttgagaatctataaatcactgagcttattctaaaagtcatagcataaccgtatcaattacttaagttataaagtatcttagagctgtgtaaatggaaacactgatttaatcctaagtactttgctctaatataaatgaagtattaaacaataggaattgaacatgttgttaatgaaattgaattattttacaagtctctaaattcatttgctttatctcattaactccattggcagtgggagggacactttcattgctttgaaaaacagaactgtctgactttttaaaaaaatcaatccatgcaagcagttacaaagtattgttgtcctgatggcaactaatgatatcacatttcagtcacaaacatacacctttgcaaagaaactgagtgattacttttgataaaattttctcaagtacagtaaaacaattcaataattttgtttagttaaaaaatgatgtattctatattaaaatagtctctctttgaattatattcagtcatctcttgagtgtttatcttacaattattaataaacggcattttaaaaacttaaattattattttacttttcccaggggtaaacatgctatttcttacatgcctacatatatagacacatatacaagacatacacataaaaacactcaccaatgtgagttacttatctgtacatgaaaaataaaacatagcatccctgcttgcaattgattcaataatctttttttttttttgtcagcatatgctaaactgaaaagaaagcaacaggtttcattatgacatttcatacatgtattatcttagggcttcttactgctattaaagacactctgaccatgacaactcttataaggaaaacttttaattggggtggcttgcttaccgctttagaggttcagtccattactagcatggctttatgcaggcagatgtggtgctgtagctgtagctgagagtcctgcatcttgcatataacaggaagtcttaaacagtgggcagtatcccaagcacaggaaacttcaaatcccgcctctgcattgacacacttcctctaacaaggccacacctactccaacaaagccatacctcctaataataacactccttagagattaaaggagccaattatattcaaactgccacaggtgtataatataatctcatcatgtttaaaccacctcatttcctcatttcccccatcagtcctctgctgatctggctgtttcccttctttttacatgtttccagatttcttctcatcctctcatggttgcaaacaggcactctccactgagctatcttaccaggtcccagtataggagccatttaaatcaagagttgagatcattatcattaacttgtggggaaagatgtgtactaatttctgttgttttgcttttgtgcttctttcttaaccctcatttgcttctccattcctctagtgagttactctctcccattttcataaggcatctatctttccttctgcttgtaagattctgtattacttactgaattgaaaaaggatcttaaggggagaaggcttattctggttcattctccaaaggtatagtctgcattggtggtgaggtcactagggccagtggttgatacacctgtcacattgcatttatcctcaagaagctgagcaagatgaacactgctggtgggttctctttctgctttttattctgtcagttcaagaactgagaccatgggcagtttcttttcatggaaattctaaatagcacaagttgacagtcaaaattaaccagtgcagattcccttctgctggactggcataatggtcatgtattcctttggtttgcatttaccatggaaggtacttatttatcctttgacttcccaagtatgtctaatgttggtggataaagtgggttgtcaattatttcattccagggcttgaagggcattatcccatgtccttgtagtttccatgtatttacttttgtctttggagaaatctgctgttattatgtttgtctgcatgtgtgtcatgatgcctcatgcagaccttcattttttgtttttttctgtatactttagctttttaaactctaaaataacaagcagagattattctttggtcctgtctgattgaagtcccatgagtctgcccaagactcttttctatgtttctagctcccaagatttgaggactttttttttttttactttgtgaatatttttcatgcctttatctccatggctcacaatgttcctaatgctgcaaccctctaatacagttctttatgttgtggtgaccccaaccataaagttattatgtccctactttctaactgtgattttactatagttagaaattttaaagtaaatatcttacatgtaactcccaaaggggtcttgacccacaggctgagaaacactgctttagcttgtacctctctcttctatgcccatgattgtaagcttggtcttttaaacatgagttcaagcccttattgtctttcttccagtaatatagtccactggttaaggctttcacctgaacattttttaactgacttactgggcttttgtttcctaattttccataggattttttcagcacctcatttcctggtgttcttttctatcctgacttgtcttccttgtttcattccaacatttatctgtttcctcattgttttgttcatgtgtttgggtcttgttcaaattcatagatctttcttataatcattcttttgagtcctttgctatcattggggtcagttactataggattgttaactttttaattttttaaaagagtagagaaggagagatgattatcataacctaatgtggtagcacctgtctgtaattccagcagagacaggaggattgctaagttgaaggcaagtatcctttagacaatgagttctgacccagccaggtctaaattgcaagactctccaggaaaccaaacctctaaaaacaacaacaacaaaaaggaaaataaaagaaagaaagaaaaagaaaaaaccaacaaaaaaatgaaaaccaaaatccctttaaatattatgatccagatgatttggccaaagcttatgatcctggtgatataaatgtgaaagaaaaagaaatgagaaaatatattaagagtgctaaaaatcatatacaaatatttaatctgatcaggtctggtaagcccaatacttatagaaaagcaaaactacaacacaaagatcatttttgagggaaaatataactaaacttaataaaaggaaactgcatacagaattactgtcttgaggacaccagtgattggcagctgttaaaggtccataggcagctgccttacttttctcttttgaggaactttggcccttaactgcctgggtccatgtatttggcctagtcatctttactctctgtactccccagcaagcagtgggcatggctggctgtaattagtctccgaggtcctgctcatcagcaaggcacacaaaggaagccaagctgtccaaggactgctctcagtgtcttgtgctttcacatctagggtagaggcagggggagcacaagggagatgctgccgtccaaatggtgaggactcctggtttttcacaagggtgctgacagtttgaattcaggtcctcatgattttggaggcgaacaaatatttacctgtggatacatgcccccatctcttaaatactgccttgggtactagttaggtaaagggctaaactgatataattccataatgtaaggaaagcatactgcaactgtttacttattggctttagaaatgtttttcaaactttagtgatttgacattgaaatcagaactccatgtgctcactggacaaatgcttagaaatctttctggaataagcacttaaacagcagagtggaagagaggagatgttactagtcagccaaagctagtaaagctcttgaaaggcctcagtgcgggtccagtttctattatcatcttttgattcaaaaccaagagatgggcaaacaagcgagattttacagaagcataatggctaccagcaggctttaaaagacaaagacccattgtttcagctatttcaccagtcattctgtttcaggtatcaagtgaagtcatgcctggcagataggcaatacaaacactacttgaagtaactcactaatcaaatcaataaatcagcatctaatacttggtcttttctaacttactctacttcgtaatttactatagaggtcccctaaaacatctaagcatttgtagtatcttaacaggcttcttaaatgaattgtgtataaaagtaatttgtcagtagtacagcctgaaattagtcatttactatctgtgacttctctttggtcattggttctttgcttcagaacagaaaggcttgcttatgttagtgtaaaagttacttcatctaagtatttgtctaccctgctcacagtttcacagagatacatctttgtatagtgattgcttggaatcaatcctagtaggattttgatttctattatatattgttatagatgagtagagctattaaatggctataaagacaaataacagttctttattactatgatccaaatgtttctctatgttttgaagcaaatctcccccaattttgggatcaggatgtgagacttcctgagtattgaggaatagttagttcacagggagaacccttgtggagatcaccagtgtcctttaaaagcatgccaagggatacctcctttagtctttccatcatgtctggacacaacatgaagttacgatctgtgaaccacaaactgaattcttatcagttactgattatgcttcatcttggacttcccaatctttagaagccttaagaaataaagttcagttgttttaagacatccaatttatattgtactttagcccaaatggacttagaccagaatatcatgagaactaaatttttccttctttcgtcactattgtcttttctgtatctttttgctttgatatgccatctgcttgaattatttccttttcaggaaattgtaaagccatttgttgtgtttcagtttgtgcctgcttcctctcttttcccaaatatgttacccaggatttaactctatacctgttcttgtagtctgtagtaataaagaagtggatgttattccttcatccatggagcttactcacatatacagatctcttcttttccttccttttagagctaacattgattttgaaagaaatctgcttatattgagatacaagtgaatgacatgatatggaattggctctccatgcaatcctcatctacaaaacggtgtttataaatggagaaagcattagtaaaagaattctctattgtgagcttccaggcactttgacaggcaagtggtaggtgcctaatctgtcttagtgaatgctgtttaactgaaacatactcttgacacaccaagggattccatgacaactaggcaagtcatacctatgaccagaagcagctcagggataaacgagcttcatttgatttgcatttccatatcatagtccattattgaaggaagtcaggacagcggctcaagaacttgaagaagaaaccatggaagaacactgcttgctggattgcaagcacatacttgctggaacattctttggctcatgaatagctagcttcttctaaagcccagacccacctacctacacaggggatgatactgccatccatcctatatcaattaacaatcaaaacagtccctcacagtcatgcccacagaccaacgtggtaaagaaaattcctcaattgaatcttcttttacaagtgatctaggctgcattgagttggcagttattactaatgagacaaagtatgaaaaaaacaaaacaaacaaacaaacaaaaaaccccaagaaagtcagttaaggaatagagattcaacttcatctaatcaattagtatctgaagtaaacatgtttcattttttgtcggcttggtgttttagcaatgctaagaattgttctacgaagttttttcaaccttaatttaattcattatgattttattttgttcatttttacaaattctaccattttcttttaaatgaagtaaatattcttcattttcaataaattctcttttctttaccttaattattactcttaaagataattgcatgcaggctgggtgttggtggtgcacgcctttaatcccagtactcgggaggcagaggcaggcggatctctgtgagttcgaggccagcctggtctccagagcgagtgtcaggataggctccaagatagaaaccctttctcgaaccccctcccccccaaaaaaagataattgtatgcaagtgataagtatagtacaattattaaaagaattcaaactatatacgtacgtagataaaacataaagcttgttttatgtcttgctatcctatattataaacttcctttcaaagtatatttttaaagtttagagtaagagaaaatttagaaatttaattatttatggaataaattgtttttcattatggatagacagtcaataatggggaagtttatgctaataagatttaaatttctggttaattcctattttaccaaaatattgatttctcttataaaaattatagctattgcatgtatatagataaaatattgaaatgtgcttctttaccatatatcccaccctcttatgaaattgattttgagtttgagggcttgattatatcattatttgtgttaagtttttagttgggcttttagttagtgaagctgagatatttttcttgtcttatgtatttagtacttggtatctgaatatctgtgtcagttccctctgaacctgtaatattcagatgctttgagatgaaaccttccttccattttagcaaagccttaaaattcaacaggaactttagggattaggtttgtatgtcttattcctaattagggagtagcaatgagaatacaagtgaaggggaaatatgtcctgtcatgtcctatgtaccctgatccctcttccaggagtggtccaaagggccatagacatgcctaattctagcaataattaattgttctggaacttgtctggatgagttttttcttgctatgctggctaattttttgccaacttgacaccaactagagttaccagggaagaggaacctgaatacagaaaagatctacttccaaattgcccataggcaagtatgtacggaattttcttcattaatagttcgtatgtgttggctcagccatgggggtgggagtgagagagggggtaggagacagagtgccactcctggacagaaaaacttgcatttataagaaagcaagcaaagccatggggaagaagctgttgagtagctttccatcatggtctctgcttaggttcctgcctccaggttcctgctttaagcttctgctctgacttccctccactgaccttgttgagacttgtcagttgaaacaagcttttggttgtggtgttttatcatagcagtggaaaccctaacaaagatacccactttgtaagaaattgcagtaaattctatcctcgtggcaacaactttttctctgtttatctaggttctaggtaaatctggctgggctggactgatttctctgttccatgtccctcataatgaatttcaaatgtcccagtggacatttttgttttttttcagagctgctggagaataaatcagcctaaaatggtttaggctatcaaatttctggcattgttttcaattgtatgacagactcattgctgtccgtctgctgctttgctttgtgattacttctagaggccccacgtttccttcctctcattgcagcatcagagtagaaatgaagtcttatggtatatccactctgacatcttcttcatgtaccagctagaccagcactcaactttttaaggtttcctggcaacagatcaacctgctttttcatttgcaacaatttcgaaggttgtaagaattagggtttgaaatcttttgggaagagaattttgacaactctgcctagtataacactttaaaatcttcataatagctcactcaatactgtgacctagaatgaaacacccaactcacttatgaaaagttatattatggtgttatcaattctaatactaaaaagagagctttgttgcagaggatatatactaacactttaatcctagatgggaagttttagtattggcaatatttatttctgtcccaaatcagtgtatactttcaatgttatcaaactgaaattcttcacagcgtttccttgaaagaagaatctactgattctaaagctcctggaaacaggtgtgtgtgtgtgtgtgtgtgtgtgtgtgtgtgtgtgtgtgtgtgtgtgtttgaccaaaatggaatagtggtggaggaaaacttgttctaccaaatcgattgtgataaaaactgagtggtgacctaaagaggtgtattgtgtatttaaagtcatgcattgacatatgactattagagttcaaggtccaaaatccaggtaaaaatgcatgaatgagtgggggtcgtccttgcttgtaatttggcacctgggaagtggatccctagggcttattggtcagatagtctaacctactcgggaagttccagaccagtgggagagcctggaagcaggggcaggggtaatgaaaatagtacttgaggaatgacacccagtattgggccctgacttccacacagatatgcacatatacccaggcaaacctgaataataccgaacacacacaggagtactagcagaccagtattaagtacatccttatataaataagaattttgtttactatgataattttaagaaaaaaaggattaaatatctgcttagaaaaagctggagttttgacattattttgatatcacaaaaggactataatagaataaattagtgttaagaagaataaagtgtatgtcctgattttagaaaaggaagattggcttacatagaatataaagcactactaggcatctaagagctagtttgatatattttacctggtaaccattgacatgctaaccataatagtttacccttataattccattattaggaaagctgaatcaaggaggactcttaagttcaaggctagcctcaacattttaaatagcaaaatgtgttagtaaactacataaataaactagaataacattgagtatataggaagaaaagctttgtttataagaaccttcaaaatcaataacggatgagaaatcagtgccatggattattggacaaaggatatgaatagctattcacaaagcataaaagcaaatggccagtaaacaaattgaaagcatatagccagatactgttatgcgtatcccaggctggccttgttcccatggtcttccttttttgttccttagccctggaactgcagttattacatcaaacacaacttaaagtaaataaatgtttttgctttgcaagtgggctttgttttgtttttgcagtgttggggaggaattcatggtctcatatgctaggcaagcattctaacactgagctatagcaacaatcccttattactttgtagcactttatataataaaaagtaacctaagttctacctaaaagtgaaacatgtaaataatctttatctgtattgtagaattctctaaagtcaattaacagtaactatatatatatatatatatatatatatatatatatatatatattcacatgtctatatacacacagacaccccagatacacaatgaccctaagatgtattattgagtaaagaaaactaattaatagaagcacattttatctttgttatttatatttttcctgaatttggaaaaacactggaggaagactaggatgctgacacttaagcttaataccacatgttcttaactgcagagccttaccctacaagaaccttctctgttgccttgcacatagacatcctgaatccaatgtgggatttgtatataggcattctcaccaggaaaaacatcaaagtgtatattttaatttttacaaatattacttagtatatatcttagtagtgatgtgggccttgagaaaaataatatttaagaacttataacaatgataaaatgttattcattttggaaagcaattgctgtattcatatttaataaaaataagtttgtttgtgtaatatccattgtgttttgtgattgagaattttgtgaactaacttccgggggtttcatttctgctccctaaactttgctccttgcctttaaacacttcacttcttgccagtggctttgtgttctgatgttagtctgtttgagggtgtgatgaatggcaggcagataggaatatcttctagagttaatgctatactatttgatttcccagtttcttgtgtggtcagaaggagcccgagtccatcagtagcgtactgatttatgactatatttgaagccaagcataacttcttcaggtttcctatagcagtcacataatgttagcaagtcatcctgtggatgtttgtgtttcagtttgtctgtagtcctgccacagacatgggctttgtgctgattttattgggttgaactgaagaagattcacttaaagtctacttctagaaactgtatattgaaaaccgagatttccttcaaaacagaaactacacagtgttttaagtggacaggccagccaatctcaggacacagcatgaatttataatgtaaggaaacaaattcaagtttctattagagtgcattctgtcctttaagtaagactcatgtcctgctgtccaatctttcatctttgtgaagaggccaacacagtgaggagactgaaagtcttattttagttaacattgactgtcctaggatgaaacctatgcttgttaacattgtacagaagtttcttttccttaaaaagtgcaataggagagaattttagtaacttccccttctaaagtgtcctgtgactttaccatgccttgttcaccgtcattctgtgctcatgaatcaatgctcttcacctactgtaagtctggtagtcacaaagatggtaagaggcttcttggtaagacagtaaaacactcgtgacagaatttctattattctctctctctctctctctctctctctctctctctctctctctctctctctctctctctctctctctgtgtgtgtgtgtgttacatgtttgtggtttctattctcctaactccctgctcattagataaacctgttttccctttgtgccttttcttttcttttcttttcttttttttttttttggcatcttgatataacttgctcacactaccctcttgaattttacacttttctgtcctcagttacttcatatccctctagtttgctagtttggaaatgtggtgatacattatttatgatttattaaagcttgactgaggattcagaaaagcaaaatcagtcacaagttatggagaacaggcagtggtgacacccacctgtaatcccagcagccagaagctagtatgtggtggtacacacctgtaatcctaggtctcaggattaagtgatagacggatctctctgagttagagatgagagctagtggccagctgctttgctttcctgatattcagcttgaagtttggacccaaatatcagtctttggatcttttattaattcgtgttacaggaaatcttggctgagtccttctctctctctcaaaaggtggcttttggagttgatggtgctgcactgggagttttctttcctggctgttagacctgctattactggattctttctctcccgtttcctgtttggtcagtcacataccagccttttgcccaactggtagagctctctcatgtctcttgtaggcccatcagagtgatgttaacactgctttatatagttcttaggatgaacacttagagcacttggtgccaactaaatgtataaggaatgctcttatgagcaagtaattatcttaacataagggggattttttttcacaaagatactagaaagcttcttagctgactaatgaatttaacaattatacatggtttcatttaccattgagaaggattttagctttgaagtatgattcatgttcttcttgaaacacatccaaaataacatattgtgtaaatttgtcctcaaaatatactaattgattctgttgaactagcacatgttcctgtggagtgtaatttgctttgatactcactttattgtaaataaggcaaatcatgagacatgtacattaaataagctcagagtgacaccctttgaatggtggtagtgttcctgtttatttaaattcatattcatgtgagacagttgagtttctttgccacctagtcactatgaatataaatgcattatttcatatatttaccttgtggcagtttctttttgtttaatgggcagaatgactctctgttgtagaatgttgttataatgagacaccattaatgccaactatctaaccttctaaaagttgatctaagacaattttgagtttcctgtattggagccacttttattcaatgaataattaattataaaaactgttgattatattaaacccacctatctcttttccaattcatattttaactctttactaaaattaaaaaaatggtgaaaaatgtttataatttttggggaagcattttttgggaatattttgtgaatcagataaaaagacgaaatccatttcatgtagaccttatttaatcatttccttttctaaggacatggttagggcaaataacaacagatgggttaggttagagatttcaaaggcatgtgggaaataaagctattggagatggtgatgaactgtccataggaagttagtttcctcaatacttaattgaatcttcctgcattaaactaatgaaaattaaaataggaaatcagattctaatgcataacctcttaacatagatccaaacatcacttaatgtttaatagaatatcagatatttgagcaattttgaatcatagttgttttacaaagtgaaaataacatgtgatataaatatttcacctcttaattttggtgttgcattaaacagtattttaaaaaattggccatatctggagaatttagaaatggctcatcagtgtagagcagttgcagttcttcccatggacctgagtcctagcccttaacatcaaacagttcacaactgttcataactccagctgcattgccctctgtggacacttgcatgcaaatggcatacactccactttataagagtggtcttgtttacttttgaataatacatgtttcttagtaacttcattagtcttcattcaaagttgatgcccaaatttattagataatatgaattttataaatattgattggcaattcatttgctaggtacagtgaattatttaaccattgagtaattattaggtatttacagtgggtttaacccgtttggtgctttgggcaatataataataatttacaaataaaatgaagtgggctgcgttcttaatttgtgtcatgtggttgcatttattgatcagaacagaggctctttctggccttcgctttccctagattttactggctgtgatgtcagatggaggggagcatttcagtggctttgtaatctaccattttgagtggcacactagtacctgaaattctgctgtagtatatttgataatgaatatttgtaaattactaaggtctacttaggttcacagtaatatctgtttaacttcctctttgcccaattaagcttttgctatttggataaactaaaccatacaaaaatccaatattctataatgggtgtctggtcgtttgttatacttctaccccccagaaagtccttttcccaaagttaggcatgtaaacaaaagtccccatttcctcaggaaccagaagaaagttctcctacaaagggagtcattctactcatatctggggaccttgtggctcctccattaacatatgactgtggtgctttctaacttgcaagaggcattggatcccctagagttatcatttatttactaaacaaaacttatttatcaaatgcaccttatttctcaaatatatgttacttatctaaattttctagcagcttggtgttaacttgtgtaggtgtaggcagagttatcatgctggtggggacattttccaaagaattgttttgtttatagaggctaccattgtatacaccctcatcctcaactgaagctcatacaaaatttcccaaaggaaaaggcataagggaactcctataacacatagtgagaattattaaaaatgagagtaaaaggtgctgcagaattgtgacccacaattcaaaatgctggaactttgtcaggcaccaatggtccatgccagctacccaaccctttagatcaaacttgacattgcagaaagctttttttgtatgctagctggcaggtgcaataggaagcactcagcttttcaaaatggtgctccttcaagcctctagattttcagtcctgagtacatgggggtctgagaggggtattagcacatgagtgcaggtgccctaggaagccagagaccctgaggttacaggtagtggtggctgctccaagtagatgcagggaaccaatagtgttaagtagaaggctatgtcatctctctagccctgaaccactagattttaaccacccagtttatatgacatgtaaaaacacatagcacaaaatttagtgatgccatccaaaaaattttaaatgccagaaagctttgaactaaatgagccattttttttccctagaggcaaaatgctaagatgaaaaaaactgctatggaaatgcaccatgtgaaacatgttagcatcttgatttgaacagacacacactacaaagtcattggaatgacgaacttcagatgatatgacagcactgttaatgctttaataaatttgatctcttgggattatagaaagggtccagtgcttagaccctttctaagtgtttcctgtttttgtgaaggacccaggtttggttcctgtcacccatgtatggaggcttacaaatacaagtactgatcagggttcaaactattcttcaggcctcagtgaataccttcgtacagatacacatacacataaatactagaaataaattttagcaacaacaataatctcttagaaataaaaaattgggtccagtgagatggctcagtgggtcaaggtacttgtcactaagcctgatcaccagagtttgggcctagaacccaagtaggtgaagtaaaatgactccagaaaattgttttccaagctccatatgcctctccacaaatagatagatagatagatggatggatggatggatggatggatggatggatggatagatagatagatagatagatagatagatagatagatagatgtgaaaaagaaatgtaatcctagaattgcttttaataatcctgtgggatgacaacaggaaaggactggtgatagttatttcaaaaccgagtacataaaatttcttaaggtacttttcggtatttaagtatataagttttactattataggatttttttgtaattttttgggagtataatataattacatcatttccttcttttttttccctacagtcccttccatgtgactgtcccttgctgtctttcaaatcattatgtctttttcgttaactgatattaattatgcatatgtctatgtgtatttctaattatataaaaaacaacctctttcgcccatatattgttacttttatgggtctgtttccagggttaaacagctcatcattccaataccaaatggttagccttgaaaaaaatatacatatatacaattgacattattctgactgagatggttgattttaattaaaaataaatgtagctttagcttaaaaattagggtataattttataaatcacagaaatcagtaaaaagctttcagaatattaagcataaaactaaatgcactaaaaagaaaattacactaaaaagaaaattgtagaattatttgtgtaaatgctatagttggtctaaacacacacatttcttaattttgaaagtagcaggaacctacgagatttcatccttagccatctcctgctgatcagtattctggagaaatctgagatagatctaatgttgtataacctttctatgtctaccacttcccatggatctaatgtggtataaccctttctatgtctacctcttcccatggatctaacatggtataaatggccttttctatgtctgtcactcaccatgttcctcatatttgtttttcaggtgcagcaggtgcagacagttcagcaggtccaacatgtctacccagctcaggtgcagtatgtggaaggaagtgatactgtctataccaacggagcaatgtaagttggatgctaaagttggatttattctttcaactcagggaaaaactgtcctttctaacctaaccctctggtcctaggattgtttgaatgatttttaacttttattttttttactacaacagatttatttaaattaaatagatatttagagctttgtctgatttattaataaatatacccatatttttctcaattagccttcgcagaatattttaaattgcattttttttgagacatgatttctcttaattgctttggagcctgccctggctagcctcgaactcccagagatccacctgcctctgcctcctgagtgctgggattacaggtgtgcaccaccaacgccaggccatctgtaaattttttaaaaaataatcatatatttggaattttgtagacctcctcacagttaaatctgtgtaagagtgatcatcttccaggtatcgtattttcctacttaagtctgcctggccccagctgtcttgtctcctttgcatcaacagtagtagctatttgtaattttattgacttttgcagccactttgaatttcaagttaatgtattattataaatgaagaaactaaaaatttgtccaagttgtcagcagtgatttcagcctgggtttgggtttttgttagcaaaatgtttctgaatgtccccaaataaattcaggttctctcagtgtcttgcttctggccctgtagtgtctgcgttccttgatcccttgagtgtgtgtgtgttctgcagtgtgtttgttccccatatccctacagggtgtgtactcctcacttccctgcagaatggatgcctcttgcatttctgcagtgtggctgctcctcaagataactctgctgtctttgcttctttccattgttccaccgatctcagtgatgtcaccctgtgagcttttacccacttttgtaacagtaaaaaaacaggcatgcatgatagaggccagttgaagtcatggattatgtcattatggctaaaagcttagattttctttaattatgtgttagtaatatgagtaatccatgcaaaatattctgaactttctattattcctttatattagagtgagatatatgctctaaccaaattcagttgttagaggattccaggatacatttaatgtttctgacctggcatctgaatatgatagatagtgggaaatggaaaggaagctcctcttttgtctccttctttttcagttagaattcaaagtaatggtttcatcatgccattgcaaaccaggcttgtttttgttggtactcttccattattcctttcccatgcatgtgatgatgcccccccaccttataccttgtatctctccatatggggttctcctcttgctatttttatatcacatggtcttctctgcttctgaaacctttttctttcttctcccctttctggtttgatggtctgtatactctctcacactcataattattctctctgtctctctgtctctctgtctctgtctctgtctctctctctctctctctctcacacacacacacacacacacacacacacacacacacacacacacacacacacacacgggctgaagagaaggcttagaagttaagagtattggctgctcttccagagaatcaggtttgattcccagaacccgcgtggtagctcttgaacttctgtaacttacattccagggtagtggcctcttctggcctctgtgatcactaagtatgcacaagatacatgtggccaaaatattcacttgcagaaaaaaattttaattaaaaaaataaagctaaagctaggatctgcatagaagagagaacatgcagcatttttctttccaagtctaggttaccttatttgatatgtttccagattcatctgtttttctgtagggtttgtgtcttacaattctttatggctgaataaaatgccattatgtatatttaccacatttaaatgaaatatatagggtaattccattttcttgctataacccaaaacagaagtggtaagattggtatgtgtgtatcactagggtagtatacaaagttctttccttgggggtatgccttgcagtggaatagctggatcacatagtatttttagattatttaggaaattcactactaatttccatagaatctgtttcaggttaccctggcagtagcattgaattaagtttcttcttctcttacacccttggccatatttgatacactttgctttattgttgataaccatgctgactgactgataggagagggaatctcaaggtggctttaatttgcatttctctggtggttgatattatttaaacacatgaaaaaatatttgttgtccatttttgtttcttctcttggaaatgcctattcagttcaataggttatgtattggaaatgcctattcagttcaataggttgtttggtagcatgcatgcacacacatgtatgtgtatgtgtttaatttttgcagttctttataaattctaggtgttaatcctgtcaatatacctgggagaattttctaccagtctttagactgtctgttcaccctgctgacagtttcttggcttcccaaaccttttaagtttcatgtagttgtttttattaaatcttagagttgtttcctttgttactggagtcctattcagattccctttatcagttcttagggttatgccaaatgctattagagcctctttcagaaatattttccctataactgtaatttgaaatattttttctcagtagtttcaagttttaggaaattatctgctattatttcattgaattagttgtctatcccttttgacttcctcccaataccttctaactcagattattaggtctccttaatgtagttagaatcttcatgtgttttgagcatcctgttaatattttaaaatacatgtcttaatgtattgttattttgattttattttctttgaaactcattcttatgcttagtcaattcatgaagcattcttttataatattccaatttgattgactggcttgtattcccattgtttctgtttggttcctccttggtgtctcagtttcttttttttcccctacatgttttcaaacttctactcccaagttcccaaccatttcattcactgtggttaatttattttctaggtcctaatgggttcccgtattttgatcatctgcttaattgactgatccttttttatttttcaagaatctaaattctctctctgaaattttaattatcttagtgtctttgatttctattttgtggagggtgagagattttaggtgtgtcatggagagttgtctttttctttgcattttgttatattttgtgcttctgttgggatggatgtgtattctagtcttactgtcccccctttcctaatgttttgttttatattactcctttagaaaggtagaagggtggtgctcactgagaactatgatctccacttttatttggttatagggaaaaatggccgtgctacccccaatgcctcattaacagtcttaacattgcctgtaataggggatactagtgttactgataggatccagaaatagcaacattgggaacacattgggaaacaaatgaaatttatagattttttttaaaaaggtgaggctgtcaatattgttaagtagggaaatgagaaagagattgagagtttaaagaggaccgaagtataaagagttcatattccaataaacatgaacagaaatgcatgtgggttgaactgtgagagacagactgtcacagatgtggaaatatggagaagatttttgtagttaaagaaaaggaagggaccagtctggcctcagtttgatcaggaggatcaaactcctgatcctcctccctctgcctccttcagcaaatcctaccagtgtgtgccaccacaactggcaacaaagtcctcaacataaatccagccaacactgaacctcttaaaagagaaagtgggaggtacccttgaacaaattggcagaggagaccacttactgaacataatgccagtagcacagacacttagattaacaataaataaatgggacctcttgaaacagaggagcttctgtaaggcaaaagacacagtcaacaagacaaaagggcagcccacagaatggtaaaaaatcttcaccaaacccacatctgacagagggctgatttccaaaatatacaaagacctcaaaaaactagtcacaaacaccaaataattcaattaaaaagtggtgtacagaactaaacagagaattctcaatagaggaatctaaaatggctgaaagtcacataagaaattgctcagcatccttagccatcagggacatgcaaatcaaaacaactctgagatagcttcttacacctgtcagaatggctaaaatcagaagcaccaatgttggtttatgtaggcaaggataaggagaaagaggaaagcctctccattgttggtgggagtgcaaacttgtatagccactttagaaatcagtatggcagtttctccagaaaatggcaaccagtctacctcaagattcagcaattccagtcttaggcatatacccaaaggatgcacattcatacaacaaggtcatctattcaactatgttcatagcagcattatttgtaatagccagagcctggaagcaaactagatgcccctcaaccaaagtatggatacagaaaatgtgtacatttgtacaatggagtactactcagaggaaaaaacaaacaatggaatcttgaaatttgcagacaaatggatggaactagaagaaaccatcctatgtgaggtaacccaattgcagaaagacaaacatggtatatatggatattagacatagagcaaaggattaccagcctaaaatgcatacctccagagaagctaggaaacaaggaggatggaaagaggtcccccagtgaaggggaaaagggacaaaaacccctgacaccagtcgttaattacttttggaattcaataaagaactctatactcattaaaaaaataaagaaaaggaagagacagtctttgaaatcgtttcctttttttttacgatacaagttcaagcacagagctcaataattaaagtaaaaaattgcaataaaaattaaaattatgcaagaaattgaacaaccaagaataaaaaaataaataataatgtgaaataagcaagtgttgtgtgtgtgtgtgtgtgtgtgtgtgtgtgtgtgtgtttgtgtgtatttggttattttatttcctcataataatgatttagcttctcccttcccctaggttgttattgttttgttttgctttcgatgggtttggagacagggtttctctgcctgtcctggaacctgctctgtagaccatcatggactcaaactcagagatctgtctgcctctgccttcctagtgctggcattaaaggtgtgtgccaccaccacctgcctgtggcttgtcatttgtatcagtttctttatgttgggaaggacagagtctcagtaattcatgcagttcagtgtgcccctgcagaggagacgaattttgtgagcttagattgcttgctttaaggatcctcaggccagctgggctgcagagatgactcaggcattaaaggctaggctcacaaccaaaaatataaggatcctgaggctggacggatgtgtttcctgatatgttacatctgcttactctaagcttgtctggtctttgcagtagtagtcaaggctgaggcccattaaaaactgtgcttagtggggagtttgatattgtgtacacagagagctggacacttggtgtgagtcttggcagggttattgtacccttagttcttctaaattcattcattcattcattcattcattcattcattcattcattcacccagactcagcttctaatccagcatcttacccagaattcccataagttgtgtttgttcataactttagttttgagtctgtccataatggcactgctttaagagcaccttcattcccttaaaatacacacgtttcccccctgtccctccctgtgtctgtactaccacctgctccagcaacagcaactttgatttctccctagaggtatcattatagctctgagttatatgcatttttcctactgaaactgcattctggcacattctttccagcctcccccctcaaccagtctagaatgagcttcctcataaaaccatgtttcattctctcttctctgccatgaactttgcttctccatctccataattgggttaccttccacgatatagggcaactacacacctttattttacctctattattgtatgatgaatgttctatgtttctagtactcagaaataatctccctgattatttacttgccagttggttgttttatttgcatttatttatatcattggcacttataaatagccaataaatttctgttattctggtggatattaaattttctgcatatttaattgtgtagataatttctcctgtttgctgtataggtttatcaccttctggagcttgattttaaatttttattataaatttaactactgttggcatttataccaaatgaaaaaaagatcccacttacttggactttattctgaaagagaaaataataccagtgtagatgctgctaaaggcaactcagttgttagttgtcattgctcctgacagcgaatgatagctagatacagaagctgagaatgaatggggtttgtcattgttgctcaggtctgtatgatagaagctaggtggccaaagaaaagagcacttgagatagaagatcagagagtctgccatggtggttcctcatttgtccagtttaaggcagtgcagacaggtcagctttaccacttgggaggatgtgaccttgagcttgaaatggaggtaatttctcagaagtgctcttatgattcaactgagaaattgttatagacattaattattgctgttgaatgttgtgctttgtttacatttttgtgtcctaaaatcttcacattgtcttctacattttaattggactttcatatttctttgtttatatgtgtgtgagtatgtcacagtgtgggtggaaattaaaaataaaaaaagacaacttgtgggagtagaattttccttcttccatgttggcttcagcaattgaactccagttatcaagcattatgacataatgataacttaccttgttggcccctttaccctttcttgtatttatttaactatcccatgtaataaataagagttgaatgaatttagcccttgtaaaaacaaccttaggaaaatagtatctctgaagttgactctttaaaattgtgggaatcctttaagtacagacatggttccctagaagctgtccagtgctgccacatattttctatggccatcagctcatttgatgagatcataactaatgaggtctaggttgtgagttcacttgctacaaagtccaattagctttgacctggactgtgtgagcccacattgcatctttacttaccagtatcatgtcacagtgaacgctcttggtcaagatagggaagatgcgctttaaaaactcattgttactggcaaatatacattttgaataggagttccaaagtgttgctatgaattattatcaggattgtagtgagttgatgacgatgaatcaaaataattactttttcagcataaactgtttgaatcttttttttaaaataattttgtattgctaccattagactgcctacagtctgtgtatcaaatacacatcttaggatacttggattctctctttttattcagaagacttcatatgtgttaggaaaatatgatctctattcttccattgtatcacactgaattaataggcagctagtatttgatctctgacttagacctcagagtcccacttctgtgtgctaataaccacattttgctaatgatcctcctaggggagagggattctgatcattgtcatgaactttcaagcacccactgcacgaccctaaacctgcacactctcagttggtgttgttctctatgcctgtattacctgcattctcatgtcatgtagacataatgcacagggtctccctcaagaggtgatgacagcactcatggatgtgtgtaatcacttatgagaatctgtaatcatcataatttgctgaaactaaagtgtttacctgcttcttgctgcgaatattgacaattactgctagcataacaggcttaacagtgtgggttagtaagtaggcatgtatttcaattgaacaattgagactactttatagtgctgggtgttggcacagaattgctttttgctcaagggaaaaggtaactcaattcattcttctcttgcttattttatccttgtactttaggaacctaagttgcataatttgtttatttccttggaatggttctcccaaagatatttccataaaatttgggtcctagttatctgtatttgtataaattcttaaaacttacattttctagtcatctgttactttggttagactagctgacgaatgtcacaaactacaaggagagtccattgcattcacaatctcttggttagtacaaaatcaggtttttgaaaagaaaattaatactctggtttctcctcagatcatataaatcttttgccttttaaaaataaaattatttttcttcttcacatcttcttttgatttttaccctgccccctgattccaacattatgcttgtcagaatggaaagagtgatgtaatctatactatgacaaaattcagacatctgttttataagggattttctgtgtaagccattaagtgaagcatgtccttttttagaggtatcagttttttagagatgaagctgcctgttgtgtttgtatctgtgcagttcatggattctcagctcttcttgtttgagagtacatttgtcatcaactcaaatgtcaaattccccaaaccatgttccacaaaatatgagtcctttaaaagcatactgtggttacctcgatgaaaaacttgtaccagtctttgagaggatcccagttcctaaaagaactttcaaggtttttaaaaggtttttttttttttcctgtattaaggaagaaagtaagtcagtatctaggaaagaaactcagtattttcaaaactttcacacactacactttgggagatgacacttttgacatttgtaatttattcagaatccataagcatgtgaacagaatgggactcaattttctaagagtcacctcttgaaaatcctgcaggtagtacattttctgaaggcctccacttacctctcccatatacttcaaatgattaataagaaaccacttgagattattcttttcctcctcaagtgacacagctaagttttagaatttgcaggtgaaattatgttttcttattatctttaacttccttttttcttagaaaaaatgattacatggaatcattaaggagtgagaatgctttctttattcgtccttctcctggtgtacagtcttagatatgtaggggctgctgtggaaatccacttcccatttagaaattaccaagcatgattggttccataggaaacttcggagagagaattgactgtctgtaaaagagcttggacatttctttataattaaaaagggcttctagtgttagctacataaaaaattcctatctcttcaaagatgaaagatgttcaaaggtagcttcctagaatgttagagttggtaagattgagatcatttatcactgccccctctgcagacaaataaactgaagttcagataggaagaaaatatgaaaactaaagcaacttgctttccactgccatattttcatactgacctgagggtcatatagacttcatatatttatttgcagggcatgcatatctgttatgtccattgagaattgcacgaagacagtccatctgaaagatggaattactgaagtcccttgacacatgtttttcttaagctttagtacaatatccacattcataggactgctggaattaacacattttgtgttggtatcttcagcccttcttcagcattgaaggtcctattctgggtaagatgagtagcatggtactaataagctgaggtaatagaatcctaaaccataacagaaaattgaaaccctcttactactttctaggataattccttcttagttattcatagatattattaatgtgtacagagttttttgttgtctcccatgtgacataacttagtacatgggctgagttcactgtactccaaaaagagaaacagaaccatatattgcatgtgttagtatttattaccttgtatgtatttatacagttcatttgattgtatttaataccaaccttaagttgttttattttattcattgttaaatgaagctactatatattcagtgcacacaaattagcataaacccctttatcttttaatctaaatgtgaaattaacatgcctatttttactttagtaactaaagatgtttagtttgagaaagtatagcaatgataagactcttacatatattttaaattgtatttttcagatttttaaaaaatattctataattgtttgtatcattgtctttaacatttatgctttgatattttgtagttatttgtgaagggtatagttttttttagtgtagattattttctgaaaactattaactcttttattgaaaaggtattttcatacagtatattctgatcacacttttcccctcccccaactcctcccagattcgcacctccccaccaacccaatgccacatcttctctctctctctctctctctctctctctctctctctctctctcaacaaacaagagtacacaaagaaagcaaagtgagacaaaatgtctaaagaaatagcactgagtactttttgtgtcaggcatctactcatggacatgcagtctacccggaagtgtggttattctgcccagggaagagactccattggagaggactaatttttcctttttatgcggatactgattgtagataacttcttggttagggcttcaagcctgtgtctgtttgctctttgtactgctgggaccccaactagcttgcacttgtaaaggccttgtgagtgctgccacagtctctgtgaattcatgtttatcagtcctgttgtgtcaggaagacactgtttccatgaagttgttcatttcctctagagattagaaacggtagttgcaggataacagtgaatgtaaagagtggagatgaagtgccagagaaagtaaagtaccaggatacttgatacccaaatgccaggcttggctacatgtgggggtgaagttaagagaacagtaagcactggaaatgtttatcatttgaaatttcaaagatataagcaaatgaagtgtttctgaatgtgtcttcttacatttctgtagtcctataacttcttgtgagctttttacatattaaaaaaattaaagcatcctatagtgtaagctgacatcaactggaaatgaaaaaatcagatgaatttaatcagaaccgacaaagaagaaaagggcaacatggagtggtcagcagtgtcattctgcaaataggtcaaaaagagacaagggctgaaggagccttttggcctgatatttacatttggtcacaagtgaccttattaaaagccacttcactgaaaggctaagggcagagcttgaccagacttctggggaggtgcaaagtgagtatgtgaagagctggcacagtcactgaggaagggagagctgctagacagacataagttgtgttttagctcaagaccttcttggtcttaaggaaggaatccacagaagtgtcttcagatatggaggataatcactagttatccatggatgggaagtggtccctggtcatggtagatctcatctttcctcatagcagcacatacatgagtgtttaaatacaaggacagaatttgtgaacagatttcttgcagcaaacggacctgttgatgagttggagatgaactcctatagagagtaaataaactacagtacagaaacaagctaaggttctcatttaatttggagaggaaatcaatctctttattggtgggaataatatttcataaaaaaacaaaatttaacaagtttcaaaggctggacattattaatatatatatttttaaatattggtattaaagataacaatcgtgatttaaacaagctagtaaatctctccttttttcttctttctaaagccgaacaacaacttatccttatacagaaacacagatgtacagccaaaacactggaggaaattactttgatactcaaggaagttcagcacaggtgacaaccgtggtgtcctcccacagtatggtgggtactggtggtattcagatgggtgtcacgggaggacagctcatcagcagctctggaggaacctatctgattggcaattcaatggagaattctggtcactcagtgacacacacaacccgggcctccccagcgacggtaagtgcttgagtttttatttgcattagcgtctgtggcttgtattgtactgttctcctctatggagggaaacaaatcacatagactctagtagggcaaattgtcttaagcagttttcatatcctgccactttataggatgtaacaagtagcactatgaagaacattactgatttgcataccctaattcagtaagtagaaagtctttatcagtaatagcaagctagatttagagaaatgaattttcctaatgtaaacaccgactttgttgtatttcggggctcatgcctggaatctcttagcacacagagattgaggcagaaggactgttgtgaattcaagaccagcctgaattacttaccacctgtactatattttatttaatacatttaaaaaaactgttttgctttcacaatagaaagccacatgtacttgttctattgtatttatattattagtatttaaattttttaaatagttatgtgaactgcatacctgtcctcctagctcatgagaggcaggggcaggaggattgtgagtttgaggccagactgggctgtgttgtgtgaccctgtcagaagatgtattgccatctgctatattacatttgccagagtcgcattgcatttgccaaagaaagactctgggaagcactggtaacacgtgattcatatgttagacacttgtgttggtgctgtgagcaaatgatagagtgaagacacaccttcatatagcacttttcaaacatttgaatttaaatatgcattttgacacagaaggaggacatatcagtatgagagtattaatttgctgaaatggtttcagaaatataggaagttgtatgccatttgatatcatcaaactgtaaagtcaagtatgtataaaagggaaaatgatcacctaagacaaaatagcaatggaattgacttattacttgattgatatgaaacagctggtgtggccagggttatacctcagtagcatcaggacaatgcttagtatgttgaagctcctgagttctaccccaaccctgcctagagatggggagtgtagcgctggggatttgaattaattgtatacacacttttctcattatgttaccatgccctttttccttgaaatgaaatgagcgagtggtgaatggggagaaaacaatagcagtacgaggcttatatttttcacgttttgggttttctttgggatgttctatgcactttgtattactcttgtgtgcttgtggtactgatttgtccatgttgtcattgttattattgaccctttcctaatcaaatttcaaactctctatttttatctaattcagcatttttctaacatcagaacagctgatctgagtggaattttttttttgcatttttgtacatatttttgaaatgctttttatatgtattggctctgcttttaataattttacgcttctaaatttttcagtcatacaagtgtttatacagattacaaaatagaaagaaaattaccactaatcagccatatcttctctagccatgttattctacccaaaaaacaaagtgctatactaaataatcttttggttttcttatcacaaaaggaaaatggtaccagtagtttagaacatgcctcgtaggatatatgtcaaatgccatttccagctgtagggaaagtatctgttatttctcaagcccttgtatgctgtctcattttcacttcaccgactctctcatactgctgtatcttccttctgaccttagcctttctgacttctcttgtagccattctcatttgccttcatggcagttctagctacctaattatccccagtgattacttagtttgcaagctctgtttgtaaattaactaaacattatctttcagatcattaaaatgtatagttatagaaattaaaagaattaattttatactttttttaaccagcggatgcacttgttttttcctatacaatgtatgcaagataacattactcctagagcttccactatacaactttgtaataatttattatagcagttatcaaataaacccataaataactgagttataggaagtaagaatagttgcaactacctttaaaatactaatttattatagatagagatataaatttgcatttaaatatccacttctggggagttataaatctgttgtgttttaggctgggttttctttttatattaatacttcctttttaacctaaaacatatgaaagttaatgaagaagagaaattttgtgtatctggggctgcactgaaaccagatgatatgtttaagttatctaaagctatctatatacatcttccagtgtttactatgttttcttaaatttattaccaagctgtatatttgatttatgtgccaccttaataatggtgaacttagtagctcaaatcacagtgtgatttctcttatcactgtgttatagcttcatttcattataggaaactagcaaaaattaagtgttatttacccctggaacttttcctactcttttcctcttgccaaatgctgaaaatcaatacatttcttcattgttttgatgattagaaatcagcatgctttttcagtcaccataaaaccttaggcatatctgtgaacagtgtctggcagcttgtcttaggccatatgctgtatgccatttaagttcagtttctctgactgatattgttgttcctctaatgtgtaacatagctaatataactgactataagaatagctgatgtctaagccaaaatgcctaagtgcagaaaacagtcacctctcttcccaatgattttctcctccatggattcaaccaacctcacagaaaatactgggggaaaaattgtggtacatgtacatactttttgcttgccattctctcccaaatgaagtagtatattaactattttcatagcatatttatattgtattagattttgtaagcaacagagttgatataaacagtctgacatacaagataactcagtggataaaggtacatgggatcaaacctggtgacctgcatttaatcctcaggactcacatggggaaaagagaaaattgactctcaaaagttgccctcttctttccacatggggatgtgcgcatacacacacgcacgcacgcacgcacgcacgcacacacaccataccttatttttgttctaagaaagtacagaaaagtgttctgataggttgtatacaactaataccgtatcttaaataagggacgtatggtgtctgataaacattcatggaaaacaagggacaacaatagacacctgagtcattactgaagagcagagaagccattgcaagatcatcatcacttcacctcaattgatagcaaacaagatacttgggaagagagctgaaaactataactcacttcctagctagcagtttcctcccttggtcctcagaatagcttcatagatgatgctcttatacaatccatttgtgtttgtacagaaatattctcacttaaaattattaggaataacaccatgtcctagggaaagcttaatgtgcagatagctttgtatggcatgctgttgaagaaggttgatgattttacataaaaaccatggtggagaaaaatcaaagatcatttcctggaatactttgctgcctaccctaaaacatgcttatcagaatcacctttgccctgttacagtcatgttgattattagaatttttatttcaagtataatttactttacctttttaaatttaaaaagctttattaggatgattttatgttttgtatttggcttgttagaatggtaatggattttatattatgactatattatggtataaactattcctatttgatgacagtattattgttccttttacttactatatcatggacaatgaaaccccgatatttttataaattatatatgtgtatatctatatgcacaaataaaaatattttctgctgatactaagaattttaagaaatattaacagtttttttggctcaccattagagttcagctaagtagtaatgtgagtgttttagattttattcaattgaaatgagggatctattgttgctatttcataaagtatgggagttggttattgttattagtctggactcatcactgtccttcaccctgattgtatcactatcttcccttcattttatttgaaattcttgggtgtgtgtgtgtgtgtgtgtgtgtgtgtgtgtgtgtgtgtgtttgtagcatcttcatttgtagaattctttgaaaactaagcaattttcatttgcagagcaaaactttgtgaatgcaatgatgtttttgtgctcataatagcctattatatcttatacttttctacatagtaaatggcagtttgatttaaaaaactttactctttcctctattaagtaattgtattttgtattcatttattggattgaattattgaattattcattcattattttgttcttcataactaaataatattgcattagacattttaagactgatataaaattagttttagaatctgtacatagtaataattctctctatataaaaccttttggtaaaattagattctgtcaaaaaacataaggaaacaaatgtctaatgtaatattatatctatatattatatatattatatatattaattatatatatatattatatatattatatatatacaagatatatacaagatatatatatatatatatattgtaattaatgtaaaatgcaatataccttaactatttggagggaaacttcagtagctatctactactgtctgaataaaacttagattaatttatataatgtaaggaaatctgattcattttagaattgtaggtgttcttatttctttttctcatgatttaaatgttcatggatccagtgtaaagtatactctttctaaaagaataagtatttttagctgcccagaaaactattgtagcaattgccaaaatttctgttaatttttatatgaattattcaaccattcttaaattgtgtattgaaaaggccaaatgacatccaagctatgcctgactctcaccctgacctcttttgtcttctcataagcagagagtgctaccaagtctttaagtttcattctagaaatatcccaataaatatacaagcagaatagtctatcaattttttcacacaagtattaacaaaaatatttttctctttttgctctaccaatgacttagaggactttttcatatcagtgtatagatggctttcctatatttgtgaaaaataggttaaacatagctgatttgtctattttccttacccaaggagaaatatttaatattgctctttgagctatataccttaatagttatagaaaacaatgtagtcacataacatcggaatttatttgtcttctgtaaaggtaagctggggagaaaataattttaaagttgggaatatgtataattatatatgtcagatttcttattgcataaaaatgattcagtgttccagctagcttaagtgtttaataaaacaatacttccatgagtagaagcacacatgatattagcatttctcagaccaaactgagcctttaagtgaaactttcagatagaataccaggaatcatctgcttccagcacaaaatcataaactgactgaatgctctgggacctctttttaaagttcttcattaaatgggactttggctggcctctactttccatctatgtctctctattccttccagcacgcttggtctcaagcagataagacctagagacagtaattctacaattcaagcttaggatattccactcctagagtttcttgataaactagaaggttaagacaaagggaattatgggccctgaacttttaaataagttacagtagtgactagtttatttgagaaaggaggtatttcatattgttgcttcatttcagaaaaatacatatattgtaatattctagaaatagcttcattttacttaatataaacaattaagaagattattaacacttgtaaatacaaaagtaagttgtgtccctcatggcttgctgtattgtttttgtcttgatattccttcagttgacaaatcaaacttcaaatttactcattgaacttactataaaatttgaaagagaaaaaaacactaacttgatgcttcattcataataatttggtgttagctaaagtgtgaaatatattggtgatatattaacactgtcttctataacatctgagtcaatgttaggcccataatgcttaatacttctccctgatttagtgggggaaatacggcacatgtatatggataattaacagtttcctagagagtgggatcttcttgtgggttcatgtttatgtaagttcagcttccacaacatggaatgcaaccacctttctgtgtatgtagctactgttgtgtttatcatgccaactaaatttcatatgctagaagggttgtaatgtagtcacaaattgttaaaaataattttacctattccttttcaaactttttgatgtaaagtaagtgagttttccatttgacttataagaaagaaagagaagaccattcttctcttaatatatttattgtacagcaaaggtggcctcaggctttccatgctctggcttcacagccctggatgctaggctactacacataaataatgtgatttcattaatatgctttcaaaagtatgggaaagatgcaataagcaagaaatgaaaacaaaatataaaaatgaaaagcaaatttaaaaatatcaggatttgagtttctttgacattatctgatacattacagagaatcagatgaaatcatttaagagatttagcaaggtagcttcaaactctgattgtctctgaggtgttaagattgaaattaaaccttggtcccaagtttcagatagtctttcttgattagactgttggaagttttgagaatgaaatgaagtctaaatgtaattaaaaacttaaaactatttgtatccagaattttgagttgacagtgaatgttatgtattcgtggtcttattccatatttgtaacatttcacagaaactttgtatgtgctctggaatttactaaaggtcacaaacatgataaactgttttctaccactgagcaatactccagcttctctccacgaaccactgaattatttttacctgctctcttcaacagtgtttttaatgacctggtgctgtgtttccatagaatgtgtcgatggaactagccccaatcactgaaggcctgtcgtttaaggcaacagtggaaatccataactaatacatgagactacattttttgaaagtatttttggttacttttatcctctgattatatcattttaaattagaatgttaacttcataaaatttttatttggttactttttgagctaccaaactaatgcttatcttctactaattttgctaatgtaagttccaagttgcctttaaaaagcacaaaaccaaataatacttagacctcaaagtctctctttaaatagagcacttgcctgtttatgcttcttcagtaatagtgacactgactctggcaaaggggaaaaacaacctttgattgcattttagtgcagtgttcctcaaatgtgagtatgtgctctagggaacgtcactggaccccaatcccagagctctgacttagtgactgttggcaaggggcccagaatttgcagtcctaacaaattatagtaatcactgctgttgtagtaattatatagactacgtacaatagtgaagatgttcttagtattaagaataaaatggaaaaggctaggtccatttgcaaatgtaagtttgatcttatacctgactagttaatgctgagtcagcagaatcgtaaagggtaattctagcccctggcttttctctagtggatatatcatcataaactaattatatcaaccatcaattataggtggtaaagctgtaagttcacagagtaatcacactgaacaaagacaatgtttggttccagcccaccatctaaatttaaacaccaactgttatcagaacacatctgatttatatatatttctgatccaaatattttcttctttttctcctaagtactttcagaagaatttcaggtaataataataaaataatatcacacgtcaggtttaacatgtaccttagttagagcgtctattgttgtgaagagacatcatggcaagataactcttacaacggaaaaccttaaattggggctggcttatagttcagaggtttagtccattatcatcatggtgggtggcctacaagcaggcatgattctagaccaagagctgagagttgtacatcttgttctgcagggagcaaaagtggacagacatactgagcatggcttgagcatatatgagacctcaagcctgcctctgcattgacacacatcctctaacatggccacacctacttagtcagggccacactctcctaatagtgccactccctatgggccaggcatttaaacatgaaagtctatgggggccatacctattcaaaccaccacaacattcgttcataaatgttataaattttctaaagtcataaaactatcaatgaattgaaattggaaagatttcatatattacagtgtttgtaagccctaaaatttgtgtgttctaaatgcttagctgtaatgtccagcatgacatccttgatggttttctgaaccaagatgtaaactagaactggctaaatgtgtcctggacgtttttaggtttttttgtttgtttgtttgtttttttgttgtttttttttagttaaaccaacagcctattttgaatctctctcaagcctctttttcatattgtatcaacattgcatattgattaacattttccctaaagttacagttttaaaagcaataccggcaccttagtttcctgggttgaaggtaggtagtccagtgtgcatttctaaggcctcccttgagggggaaaaaaaaaaaaagacccagcctagacctttagaaaatactcagtcacttgacctgaactgataatgatttatctacttcgtgcaaggcatttgaaacttttcagattccatgagacatgcctttacactgataaccaggacttgggtttacaagtgcacatcagatgccctcatatatgactctccttgtgtcagtatcgatacccatatgactggaatcaaagctccttgaagtgatgcctatatcatgtgcagcaagccatgcttgttttccactctgtttaaacacatagccaccctgttgggcatcctctactccgcttgcagcttttcttagcagacattccctgatgctgacacctccagtattctgattgtgcattgcaacttaatcactacttctgcatatttacctagtgctttcttgggggcctctccgaagggagtctggccttgccatacatttcctaatcaatagatatctggaacagtggtacaagacttgatgactcccttaatcttacatcttccatgccagacactactatgtggaagatgctgctatgttctgctcctgactttggatggaatctagctgccttggatcacaattggatctgcctgtgtgcccaccctaaggaaacttccttaggcagttgctttctatgggtagggagccccttcagtggcattctgagtttagtgttgctcttatcagatacatttgcattttcacaagttttaacctttgattggtggggttttagcctcaggtcatctctgccactgttccgctgatcggtgtctagtttctttttaacattctggcctcttttttagcacatggctttgctgcaattttaaactagtttgaactcttccttaagaaactgcacactaaaaaatgtatttctgccccttttgttgctttctttaaagatttttttctacttttgattatgtgtatgttctctgtgtgggtgtgtatacacatgagctcaggttcccacagaggccagagaagtcagattctcctgaagctagacttacttatgattttgagctgcctgctgtgggctctggaaactgaactcagatcctctgcaagagcaggctacactcttaagccatctcttcagcccctgtggctctttctcactgttaagttaggtaagtatggtgaataattaccatgcttcaaactgaattctgtcctgccttaaagtttttttttttatacaaaatatgttagccattaattttaaatttagctctgcttaagttttctgtactaaagcagaataaagtcagattctttttttagcacataacctgaatggcctctactctagttcccaatacagtccttccttccctctgaaatctcatgatccaggcctgtcctattcccattttacttaattttattttatatgcattggtgttttgcctgcatttatgtctttgtgacagtgtcagattccctgaaactcgagttatagacaatcttgagctaccatgtgggtgctgggaattcaacctgggtcttctggaagaaaagccagagctattaaccactgagccatttctgcagcccatctttctatctcaagcattcttatcttccagctcctatccaatagtacattaagctttacttacagcatttgagagcttaaaaggcagctcaaagaaggagggctttattttgactcccagtctgtcaggttagggcagttatagtggcagcaacttgagttagctgctcacattacatccatagtcaggaagtaaagggagagggacacccactctctcatttttattcagttcatcacctcaacccacgaggtgctcttcatggttacagagtatcttccaacctccattatctgacctagataatccctcaaaggcaagcccagagactagcctgatctagaaaattccctataggcatacctaggggctaacctgatctagatcatttactataatcatgcccagaggctgttttctagttggtttttagatctgtcaagttgacaaacaacataaatttacaaatataaagaaaattagtttgaatttagagggatgcatcttggattccaatcaaactcaatgcctactcaatctcaagacagtcccttagttccagagagcttcagttttcttagatgaaagtagacctgtttcatggaaatatgcatatctaatatgagaatgagaatatgcctatcctattctatgaggtggttctaaaaaatcaaatgaaaaaatgggctgaaatccacctaagagtaaagagaatatgctatgacataaataaaatagtcataagtaagatgatataaatgttaagttcttcatgaacatgttatcccatttacataaatgcacatgaatgtgtatgtaaacatatgtcagagggatcctcttttttgtcctgtgaaatatataaaacacttaccatctcttcatttttgttgtcaagtagacacttaccctcttggcattacaattgctttaaaataaacactgtgttctagcctcttaattgcttacactggaagcatttgagtagattttcctgaatacttttagagttatttatttggttttttttgtgtgtgagtttgagtactttgcttgcatataatctatgcaccatatgtgtgcatggtgcccatttatgtcagaagaaggcatcagatccctgggaaatagagttatgaatgatcatgacaaagtacctaattatcatatgggagggaagagtgagacttatatcccaagtcatatagtgttagcagggagctctttgcagggtcatcttccacataaggtcaggcatccaagcttagagacactctgcaaataaggttagaggaaaagaggaagccccactgagaaaaggaggcctccattttgcactgagctcagggagctatcgggacatggtggtacaaaaacttaatagcagggttctccaacaatagtcacagaaaatcacattgtagcaccctattctgtctgtccattcattctgcaaatgagcatttgcctccaatcttctcagggggttctaatctcctctaaccttttcaaccactgagtagagaaaacacttaggtatggtagcagctcagcaaaataagaagccatcccattagaggcattctcctttgttaaagggcagtgagagtggtaattataacgagaatagtttgagtgaaacattacttccatttcattgacactatgcactattttagaaaatacattatcgatctctcctttgtgcatcaacaaagagtaaaatgcagttttttcttaacatctaagcatcactggcccctcttccctccactctggtcttctttcactcaggacctaggtaggactttctctgaagttccttttgggatattgatttgttgttgctattggaagtaatctagtgtggctctacatgcttggaggctgccaccttattcgggtctccaggaaggcagcatatttttgggtgatgaaatgtggtcagcctgagttttgagcagcatgtttgttatgctctctctctttctcattagatagtacttgttcacttctagttcttccttgatctgttgtaaaatatttgtaggagcaatgctgaatttattattatttctcctggggaaaatactttatcccccttacttctgattgtcaaattccaattcctgagaaatcacagaatattcacttactggtctagtttactacaacatttgcacattaaatggatttttgaatgcattttccaccttacaaagttcgcacattgcatttttattgaactaaaagaactacatgtaagtatacttattaccacatggtcatttctactacatttgtgactgtataagtcaaattcttgttgctatgacaaacatttgaaaggagaagagaaagagaacaaggggaaattgattataactcacagtttgagcctgtggtcacctgggcccctgatgccaaaagcttattgctgagtaaattgccacatgatggccaggaagcagaaagaataggcaatccaaaccacttagcaccttccagagtgaacactcagtttccttcttcctttgcagtctacccctttacatttccaccacttttcaaaacagttccagtagctaacaaccaagaattcaacacataagcttctggggacatttcatattcaaattattacattctgtactgtttctcaaaagcttgtgactacctcataatgcatttactctacccatgaaagtctccaaaattaatggttctaagatactcagaactccaagtttaaggtctctgaaaatgaaggcaaatctttgctgcgagccatctctgaagttaaaaaatgtactgcttcctccatgcagttgcataaatgagagcatagaagatagggataggaccaaaacaaatctaaaacccagcatggtaagcatcaagtcctgcagctcccatgtctatcaccttcagcatttgtatggtgatgcaagctccagagcacttgggtagccttgactctacagccttgctgcttgcctgcattacattttttttaagttaattgtactcacagacatggaagctttcttccacagacatactctcagggttctccatttcatcttctttatccccattgcttcacaaagtttggattctgaccctgctacacatttgtctggcgttctgtgccccattgaaatttggatagaatccttcatgaccttgggactcttgtgttctgtatgccttcaaaactagcatcaaagtctgatagcagcctgggtttcttgtactctggctacagtagcttcagaatgcccggggtgggggggggagggggctgaataaaatcaagcttcttcgctagggagtcctgtgcagcaagaggcactggagttttctccctaagcctttcaagtgaactggaaatttccttctcttgagccttagaataggtggggtctggcaatcccttccataccctcaggtgtcctgttttccagatgcaaatacacagcttgttttcatgtttcaattttggtggtggtggtggtggtggcggcggtggaggtgtgtgtgtgtgtgtgtgtgtgtgtgtgtgtgtgtgtgtgtgtgtgtgtgtgcgccgcgcgcgcgcgcgcgcgcgcgcatgcggatatgcatttgagttggtatatggtatatgcacatgtgttttcagatgtgggtgcctttggttcccacagaggccagagaatgccactgggtatccctgtctatcattctcttgccttattcattggaaacagtttctcagtgaacttgcagataaccttgcagccagcaaacccagtaatctggtttccactcctgacagcactggagttacaggcaggtgtgcagccatgcctggctttcaatgtgagtgttagaatttcatcatgtatgggagagtgtgtttgagtagtctaccttagaatgaacaggacaaagaaagagactgcctgtgtcagtgggaagctttctctattttcctctttttttatatctggactctcaacctatggaatgcctgttacattttgagtccttctctcccttatttgtctctgttaacagcctcacaggcacccccctcccccagaggtacactttactctcctgggtgcttcttactatagtcagttaacagtctaggttttcgaccccagcaaccatacatttttctgccctggaagcaaattaaatcagtgtggcttttaacaagtgctccaggcttcttatggttccttttcccaatctaggaaaaccatttaagtattcattggagtcatatcttctgagaatcccatgtttgacgaaggaggtaaatcacacatgtatgtgctttagtgccccccttcttccaggtaccccaatcccaaatacaatttttcgtaaaacctcacttttcacacaaattgagtcaatcacaataaaactaacagtgaggggcaacatcagtaatacaaatagatccctaaagacaccatttactgctggtctgacagaagctgcttcctcacaaccccttgtaaggatttggtcctgagtctgactcagctgttagaattttagtgatttttatctttcatttaaacctataaaatcacaaattaaggattatttttgtatttgtttattaaaatgcagtctcatctcaaaatttctatcctcagactttaaagaaattgtagtcatcgtaacaaactaaaattttgagcaaattcttcttagaaatgatttattatcacatgagtattttcagttatcttatactctctctttctctttgaaaagaagaacacttattgattccttttatgagatataatggcaagcttccttagtttagcattttgacaaaaaaatatttactccttacatttacattgtgaactcttaattgtgagcttatttaatatatacaatatgactttttctgtttattttcaagtttaatattaattccgtggaggtgtggattgtaggctgttaaacctttgctctatgtctaatatccatatatgagtgagtacgtaccatgtttgcctttctgtgtctgggttacctaacttaggatggtttcttctagttccattcatttgtctgtgaatttcaagattccattgtttttttccccctgagtagtactccattgtgtaaatgtaccacattttctgtatgaattcttcagttgaggggcatctaggttgctttcaggttctggctattacaaataatgctgctatgaacataattgaacagatgtccttgttgtatgaaagtgcatcctttgggtatatgcctaagactggaattgctggatcttgaggtagacttgttctgattttcctgagaaactgccatactgattttcaaagtggctttacaagtttgcactcccaccagcaatggagaagtgttcccctttctccccatcctctccagcaaagactgtcattggtgtttttgattttagccattctaatgggtgttaacaaggaggactgtaaaagagacatacatggtctcccagtgaaggggaaagggacaagggcccctgaacaaattggaagcatggaggaagggagagggaggtagaagaaagagggggggagaagaggactgaggaggagaacatgagggttcaggaagattgagtgaggagaggaatagaggaaaacaagaaaagagacacatcaataatgggagccactctacatttaaagagaaatccggcactagggaattatacagagatccacaaggatgaccccaactaggatcctaagcaatagtggagaggctaccttaattaaatgcccttcccctataatgagaatgatgacttccttaaatgccatcctagagcctccatcttgtagctgatggaagcagaagcagagatctacagctaagcactgagccaaactcttggaatccagattcagagaggggggagtgaccaacaaaggtgtcaaaaccacgctgggaaaaccctcagaaacagctgacctgagaaagtgggaactcatgcaccccagtcttgcagctggggaactaacctaggaccaaacaggtcccctgaatgtgggtgtcggctagaaggactaggcagtttatgggcctctggcagtggaaccaggatgtatctctagtgcaagaatagatcttgggagcccattttccaaggagggatattctcttatcctagatatagagggagggcctaacccctgtcccaaatgacttgacagattttaatgactccctcatggaaggcctcaccctccctggggagtggaataagattgtttctaatttaaataaaatttataaaaaaagattaattctgctagcgtctcaactggtggagagaatgatttaaaagccactttatctgcttttatgtcttcaaaaacagctaatcatgtaagaaattattgcttatttttttctttttgagacaggatttctctgtgtagctttgtagaccaaattcacctctaagtcacagaaatccacctgcctctgcctcccaggtgctggtattaaagatgtgccccaccaccgcccggctttattgtacattttttatgaattaataactgcttactctgaattgttgatgcattcatagtgttaaacataatgaaatttgttttctcaaattgcataatgatattttaatgagctagtattactataacttagttcctaaatgcatactatttagtctctggcttagtagaatgtgcagtagttccctgaactaaaggacagctgtcttacatgtgaggtcatcaagagtgcctcaggtttatccctggaacctgttgcttaagaatattttttgtgattatccatggtgtgctgggattacagtgaatgtaaacaattctgttcttgtcagttttttttttttttttttggctctgagttattttctcttctcttttttctgctgttaattctaatatttctgcttcatcatgtcctaaattataatgtagagaccatagtcacatctgaatgctcacctgactgacctttccctttcaaattttaatgcaagagtaaaagagggatatataggtttattagcttttaggcataatgaagaatttttgtaacttgcattaaaatactaatgctattaaactcagattctgctttatgatttttattttgtgacagaatagaacaaatgttaaatatgctttaggagtgaggctgtatagagagggtccaatatcccacatcttgaactatgcaagtaaaaaatattttctaataactagaaaaatctactagggttcttgatcctccaatctccatactgattataatttcaaaatgttcagaaaggtttactgttgtgattgagcttattattaatgtgcatattctatttcattctctagggatgggaaagctggggaaacacatttactgatagctattcattagccatcattgaagaatgaattagaccttaagaatcgatcaaaaattctctggtcagctttttattactatcttgtcttgagcccttttttttaatgacatctattatcagattgaaatggcgattgagacgctgcaaaagtctgacggtctgtccactcacagaagctctcttctcaacagccatgtaagttgcctcttcatgtacactaatctcttgcttgttccgcatgtgttgcttgcctctaagtgcttgttttatttatttacttatttattttgcttcttaaccttcctttctcaagcttcttcagactctaaccatttaatgcccattttacacagtggggtatctcaaaacagaaccacagtgcactgctgctttactgggtgtttgtactttttatctacatatacaaaatggaaaattaacaacaagccaccatgtatttctaagttagattaatagtgcttttaaacatataaagggcaaagttttgtagtacacatccttatatctaagacttagaagtgaccatgtccactgtgtggctggtggagtgtctaagtggataagtggtcactaatgccaaaagcagtgataaactattttaaatgtttttactggtaagactgtaaggtaggcaggtcccaatcatggatgaactcaggtcctaaacactgaagagaaatgaaaatgagcccaaagtgaagttgtaagtaagccgtaagttgataatacctgaggcaaacagagtggcctcactgcttcttgaagctttctctgttaccaggcacagcatcaccataacactggtaagttgtgtgaaataaacattttcatcatctgttcaaatttgaggaaatcagtgaaaatgcttgttacagttatttttagaaaatgatttctgaatgtatggggatgtccatgggataacttaagtcatatgtgctaaattagtattagtgacatttgagtattagagatttcctttcaaactgactttaaaaaaaattatggtaaatttcttaatttttcttaatatttctatgattaaaagatttaaaattaagatcactgaaatatactattaattttcaaaaagcctacagtatttttgacaatcatatagtttatagagaatgtttccctgtatttttttttaagcaaactgtttgaattttgaattatttaagatttgtattctggaataccagttctttttgatgttctaatgtttgtttttggaggaggtgttttgactcattcctttttcaagagaggtttcttggcaaacacaaacatgttagccaatttgcagaaggcctataattttggtgaaaattatagatagaaactttaaaataaggatatatattttgtcccctctttttaaaaacaatttgaacacaattttctactctttgttctcaaatatatcctgcttattggaatgagtctgtggctgtgttaaaggctagtttaccatatgctattgaaatgcatttcccagtgtgtatattgaaaatagcaagagagaatgcttatcacttccaaccagatgtgtgcaggcatataagtatttttaaaaaatgaatagaaatttgtagttgctctcttgaaattttcagatttctaaattgactctgaaagtcaattcttatttcacttttgagatatgaaatatagtataatgtgttgtttaaatttaacttcagtcacccaactttagtgatattttcatgaaccataatgtaggattaagaactttttaaaaatatttctaggggagggagagggaactggcattgacatgtaaaacaagcttgtttctaatttaaataaaaaagaaaaaacaaaagtaaaagaataaaaacaaatgaaaatgtgaaaaaatatttgtattcattttgaaatatttggggatatttgaaaatcattttcttcgattagaacttgtgtactaaaattcattgtcaatgactgtgtgaatgaagccacaaagacaacacaattatgtcgtcttccctcattttgtgttttcattgcatagtgtagcaaatcttccatacagttaaacctactatctgtgtttcagaatgtaggaagagtgggtgcaagtgttgctcttgtggtgatagtctttgtttcccgacttcactcattgttattacatccctgaagtggccgggcttgctcaaaactgcacggatagttagtctttagacgcaggaatgattctgtgtaaatggaagtttctctcctgcttgccagttcccaaataaccattctgaggcttaatgtgaattataattatttggccagtggctctggaatattccgaactggacctcacagttaaattaacccatttctattattgtatatttcatcacatggctgtggcttattggtactgttctggcgtcttactcctcctgcagctacatggcatttccctgactccaccttctctctctctctctctctctctctctctctctctctctctctctctctctctctctctctctctctctctctgtgtgtgtgtgtgtgtgtgtgtgtgtgtgtgtgtgtgtgttattggccaaatcatcatctttattaaccagtggtaataaaacatattcatatcacacagagagccatcccacatcagttctggggatggtttatgaacagaagccgcaggatcagtgttctactgatgaccatctggttagtttcttgaatgcagaaaacttttacattgtctttccctttggaagttcatgatctgactttcattggattttccccaacatctggaataaacaaatgcataataatatataataaagtaaaatatagagataaaagataataaagaataaataaaatgctttttagtatatgtcttctggctggtaacttctttcttaaggaatttcaaattcacgcttagttggtgattatctgtcacatggaaagttgacagtaggacaatattttaaaagatattgcccatattttaagtgctaataaactatgttacattacccatcacaagagtgtaatatggaattctttgacatagttgaggagttcacctttgtgatgattaattagttctctgaattatcagttcctacaaatatcagtctcattaggaagaaaattagggatattatgtatatggatccatattcaaacttctaaaaacaggtgttaataataacttttgagcataaaagtctatttgactttgtgatgtggtgcagaaataatttcctgttctgttcatatgatttaataataattcagaaaaattattccctgcaaattaagtaaataatccctgtctaatagaatccaacttgactctctcccttcctgtgctttctgcacatttgatgatgaagcagtatttcattttatatccattctctgagtataatcttttttaaagagttatttatctttattgttgacctgaatgtttatatatggaccacataagttcctgctgtccagagaggcaagaggaggacagtgaatcccctggaactgaagattgctgtgagctgccattgtgggtgctggtaactgaccccaggttcactggaagagcagcaatactcttaaccacagcgtattccagcgtattttataaagagtattttatgctaccaatccatattcattatttccaatatgctattatcatacacattaaaatgcaagtgaaatttccatgtttggtacacaatactctgttccagctgtggctgaggagagttgttgttgcatgcagtgctttagactgtttatgttaacctggtggcatcatgtcagcattcgcaccatagacaaccaagaaatatatgttgactactaaaaactctaaagtaataaggatttttatggtttgtcttctacaacagccatagtgcccagaacagtactggtacatagcagtagatgtatactaaatatttacctagtggatggatatcagaaacaataaaaagggacagaacctatctttaacctagggttcctttcccagtcacatgaattcatatttggaactaatacatagactctattgatttctctttttgtctccaaatattcaatcagtgtgtatgtactggtagagggttctctctcatggcattctaacttaatgaagaaaatgtgggtcactttataatttcccacatatatctttaagattaagggtaactttttcttccagtctaattctttaaaaaagttatacctctaagtgataagattcatctcttccctcttcagactgtgctttgattttagttcttttcatataacacttgtgagtgtattttattttttaatttaggtatatgtgaagatgctgttaataattttatagatctgcctaagtccaaaaattatctaatacttttagttacagacttaagcttatcttctgctctcagctgcaattaatacacattttcatttagtatttgtattatattcaacttaggatactttagatcataaatgtcaatgtggaattatagttaattgttgctaacttttgcatagtgcacttaagcatgtatttcttcttagttcaacttacactgtatagaaacctctaggcatttatatttcagaattttcacaatctgtcagacaattgattcataattcttacaagcttacactactgaaatgtattatcttaaaataaaatcttggtttttagtcattcacccattgctgacttggacctattataaataaaatttgctataggtctgtcaaatgtataacatgggtgcattgaacttaaagtggttcctaattgataataatccatctttaaaatgccaaatattacatttagatgttaattgaacagctcattatttatttattcttgtcaattaatgcttcctgttaggaaaaataagaactattcattctctgttatcagttctgattaatatagattaaatgcaaaaattgaaagatgcaatgctttctgcccttagatgagtatatgttggttcattatgagaataattaggttttaaagataaaggtaaaaagtttctatgatatttcacaagctttaaaatttgtaaatatagttactgtataagatagttattaaaagaataaaataagagaaacagatagttgctttctataccactaaaagttaagagtattgaatcctaatgtccaactacattctgttaacagcaagaaacaatgtaccttataagtgttactcggtttctttgggtaggtagcatgtgggacatgaaataatattttacagtataatacagaaatgtaactgctaagtttctccaataataaaaaaaaagctacctagtggtatgctttagacttaatatttaatttatagtttcctcatgtatcaaggtgagaaaattatatactaccttgtagaatgtagattgaatattctgtctgtgtccccaagtcttttttggcatattttagatgatgcattgcttctataggaagtttcttggataataaccataggtggtgtggttgttggcaggcctccaagtgggaccccatggtagcaggcaagtcccctgtgtcttcagggcttttatctctggtgaccttcttctctacttccacttgctctccatgcttctgcaaggactaaagtgcctcattttgatgagatggaggtagaaacaaatttaccttttctattgtcaagtcctagtcaccaagacagctgtcctctgtaacttataaaccaaaaacacagctgtatgctatgcaatatgattgtgtgttcacattgcccaaattcatattttcaaaaactagcttaaaagtaaaacatttggggggatatgcacaatataagaagaaaataagatttccaaacaggccaatgtttttacttgtatgtaaaagggttcaatagatagtctgaaaaatgttcctttttctctgaattctctaactgtggtgtgattaacattatttaggcttcttcatagtttatgctactttttgttataataaaagtagacattttgccataaagatttatttttaatatatatatatatatatttactaaatatatacatataaaatatacatatatatttactaaaattgacctggctaactctgacacacaatcactgttggaagtaatttatgctgacctttgatttttatgctagtttccacttttattaaatacacttgtttaaaagttttaccaaatatttatatttgccttttcaaagtctttcataaattttttaatctctaagatactatcatttactgtgaggaatgagtaagctcatgtacctggttattttgtacttctgagtacttaatgttataactagtatataactatgcctattaaaattttcatttgtattgatttatttatctacttttatttgtatactgtgattttaaagttcacattttaaaattgacttctccatttctatgggaaaatgtcccttaaatttttctatataatcttctcattaacaaaggaaagaacattgactcatttcagtcctctttcttgtttttgttttgttttcgagacaaggtttctctgtgtagctttggagcctgtcctggcactcactctggagaccaggctggcctcgaactcacagagatccgcctgcctctacctcccgaatgctgggattacaggcgtgcgccaccaacgcccggctcagtcctctttcttaatcatgttactatgccttttatggacacacacacacacacacacacacacacacacacacacacacaaacacacacgcacacatgcatgcacacatgcacacacatacacaatgcacacacacacacacacatatatacacatacacaccacacatgtgcatgcacacatatatatccacaaaacatacacatatgcgcaaatacacacgtaacacccccccacacacatacacacacctttgctacttttaacttatatgtgttctatgatgtgtgcttgtggatatgagaaatttgttacatcatttgcaactgctaaacgtattttcatcttatacaaaatccaggaggttttttttttaatttccttgttaatccatgatgccaagggtctgtttcctatttttaacatgttaagaatacccaaagaaggcagttatatcttgctctaactagcacctgtataaaagactgtagctcacttttgtgcaatatggttctcaatggctacttgaattccacttgaagtgctttcaagtcctgattattttactgaggcacatggatgaaacgaacttgtcaggtttgtattgctgtattttgtctttatcacttgtgttttatatttttaaattcttgaaatttaaagaaggaaaaacctctaaagcatgccagttcactgttccaagtagagtactgattatgtcctcagtgacttcatgcatgggtgaacttactttggatgttttatattaaacagatacttatagagaacatagtctgtgcattattttcaatacacagcattcattttagtgcctctaaaagactttttactgataggaaggttaaaaataaacactatgaaaaaacttatggctgatatttcttttctgtctgtataagaaggaggctaatttatgtaatctcgttagtgttatagtgttgaattatttatgacttaatattaagatgtacttttagtttgattcatatatgtatgtatatatatatgtgtgtgtgtgtgtgtgtgtgtgtgtgtgtgtgtgtgtgtgtgtgtgggaattgaaaatcttcttgaagggacataattttatttttacaagtatcttatatacttagtggtgtattttcaaagtcattaattattgcaagtttgatatgtttaattattcaatgattatctaggaatatttgaaaattgaaatgctctggaaaattcagttgttatagtttaaaaataatcaaaatattttgatattttttataaaaacctgaaagttctggttctcagtttcatcaaaagtcttaaatgagatatgtaaacttgatagataaaccaaaataattcttaacttacatggctttccagatcatcataacttttagcctttgagtaaattcccagaggacaggtagaataacattcatctttgaattattttacttccttaattcacacttaattataatcttgggttcaatgtttgctctttactattccatttatatttgccatggagatggtgaagacacataatataaaatatttgctgctttgaaggtctgttggcctagagtaaataggaaacaagaattagaaaccatgctctgtcactgagactgtatgaaatccctggaaaagtcatttacatttattttacttgttttgtaagtaaataaatggcagagattttttcttgtacattccaaatttaaacatttttcaaaaaacaaagtacaatataaaacttgaaaatatgaactataggaggagaaaacattatttactgcttaccatggtagtgtgccttctaaaattttgaggaagaaagatacctcaactctgagatagaaaattgagatgattgtaaatattattacctttcattatatagaagttctttggaacctctagtgaacgtacttctttggagggaagaattactcaattttgcctatttgcaacatttgtccctgtagataataatctgtagataataatgttattatttcatggtaatttgagataagtaaattgtaattctgtaaaaattaataaaatcttaatataaaaaaatctcatgtaagtaaatctactgtttacttattgtaacaaacaacgtgaaagatacattaggtactgtgttaccagacttaaaatatattaggtgctatgttgccagacttagtagaatgttttgttttataacatttgtaaatgatatgtttatattattaattttgaccagccaatgctattattttaattcttgaaagaagtatctgtctccaggataatagtcaatgtagggaaaatcattatctgtacttatgcttgacaatttgaagataagatattttctaagctgataactactgacatttcccagagcttagaaagtcagaattagcaacttatggataatcccagtttatcctgagttaataaaatacttccaagtagttgtatatactgtatcttgctgacgtttggcaaattatgtgaattctctgcttattctctcttatcttaacagctccagtggctgttggacaattacgagacagcagaaggagtgagccttccaagaagcaccctgtacaatcactatcttcgacactgtcaggaacacaaactggacccagtcaacgctgcctcttttggaaaactaataaggtccatttttatggggctacgaactaggagattaggaactaggttagtactgacaattgacttatttagttcatctttctttatcaaattacagcagtgttgtacactgagaggaaatgtactgggttacagaacatataaaggaaatatgaatggaatgaagtcactttataaagtccacaggaaaaaaattattattattcagtgaatagcaccaaactgattttcaaatagatattagaaggccaacagaccaacctgttcatgcaagatttgcatatgatacttttaaaaattgttatataccactattgttactttctgaaaatgaaaatggataaattgacatagtaagtgagaaacttagcacttccttattgttttaaaatacattcagtcatttttatgaaaacttttagactagaagttaaggttgtttttactttattctgtatttctgaggtgaattaaaggtatttgctaaacttgcaaaatgtgcacatttgaagtccttgcttatggtcctatttacctcttaatagccttgtagtcatttctcttgctcttgattcataaaatggacatatgtgggagtgaaactgcatcatatttccatcttagagaccagtgatgtcaggaagggactttcagtctcatgggtttctttcccttggaaacaatgagtgtttttcttagcaaatataatgaaaagaaaatttagtgccttggagctccatttttattctctatgatttttacaaattgaaaactagtattttaagcagttagggagaaacatacaaatccattgactttgtaagtcatacaggaatcatatacaaaacattaaaatagagatgctgcactctacagtggatgatagatctgtagttataagtcacagcctcaaagacttacagtacaaaggatttttttttttactctctgtaagggaagcaatatcctactaattaactaatcattatgcatttatgctgaaaggagaagtaagtatttccagagcgaagactaatctgtgcctacccatctccagacacatgactcagagccctagagcaagacacagtttaacatgggaaacacatacccatacactctagcctcctttttgttactgtgataaacagtgtgaccaaaaacaacttagggagaaagtttcactggtttatacttccaagtcttaatccatcattaagagatatcaggactagcaactaaaggcagaaacctggaggtcatggaagaatgcttcttgctggctaactcacaagctcttgcttagcccaagaccacctcctacctttgcatagtaccagggctcactggactggaccctcctgtatcaattaataatcctgactttcatccaaagaaatacctacaggccaatctgatctaggcaatttctcaatgagggctttcttcttaggtgactgaagtagaaaataaaatccaggaaggaaaccatttttgtagtacaatttttatagagagttgatacctttatatataaagaatcaaagaaacgaaaaaaatcgtgatatttagctaactctccagaagtagctagtcctcaagaagcatgagtggataaagtggtgtgacctaaaattataaataggccctccattcatattccatgatgtatcctcagacaaaaagctacacctttcctcagctgcaggaaggcccctttggcatgagagtcctaagacctactaacaagggaacatcagctatgttttatcacccacgtcactgggtaagaagtgagagaagtttttctactcgttggccagtttctgctgttttctctaatgttgagtaccatattttggggtagtctaccaagaactttattactgtgttagtgtgaggagagtttgtatgtgtttgaactgtgaatttttctttttgcttgctttgaagcaaatgtgcaactttcaaattgccagaggttcagttctttcataaatatattcttttggtacttcaaaaggtagtatattttaaattgcagaatgtgattgtctattcagactgaagaaaccagctttcactcctttggaaaaaaagaacttttgtttctctcttatttcatccccccccaaaaccaggaaaatcattatttggagacctaacctagtatttcctagctgatggctcagtagttatacatatggtgccaatattttgaaactctaggctttagtcaacattctaatagctgtattgttgcactgcttttgttgctgaaaaggatttcaatgggtcctattttgaggctctattcaaaccttgaaacacatctttaaaatagaaagggacaaaattggggttgtttgggtttgtgaatgagtagaatccatattctataagtacattctgcagtattgcagtttttactttcgattccctacccccaaggattctgtctcctaatccttttaacattgtatgtggtgtttgcaattgagttggaaaggaaagcctaaaagaataaggagggaataaatgctaggggttgagtttaaatgaatgctaggaagccaggagaatgctaatagagaaagctgatggtgttaggagtgaaattgcagagatttttctgctgtggaaactgacatggacttttcactctatgccaaggaatggaagaaaaaatcagtatagatcaggaggcagatcagatcacatgattttttgtttgtttgttcatttgtttttaagtgaacagtctatagaaatgttaccagtcagcaagattgtctaatgaaattatccaaactagaccagaccttcttttggcactcacctaaacaaaaagcaaataaaaccattgcatttctaccaaaggcaatgcaaagggtaggttttgatagatcccatgtccagttaaatctggctgactgtggacaagcctgggtggacttctcttcccaggcaattccaggtgggataaaaaaaaacttcctctcactccaaccccaatgcgaatttgtaagaaactgagtctcaaaacaaaagcaccaattttctttgtgcattttccaagattaatgcctcctgattcctgcccttcccttcactccctccaacctccagttagtgtagaacataccagctgtgttcctgtaggttttgttgtaggttttggctctaatctcagtgggttttgtagacaagatctaatctctgaagtggaaggtctttctctgcaggtattaagtctttacttctatgtcattttcctgaaagtataggcacttgatggctttaatgtatcttcaaatgtatggctcatctaatgtatgttttttttgtcttggaagtaaaattaatctattttcattaaaaatatttaatccacatagcacttatatttctctttgtaaatgaaagaaaaaaattggaagagcactcactgacatattgctatatatagacttgtgaaaaactagtctctctgcaagaatttgcatatttaaaatgttacttttgcaagaatttgcaagttccattcaggataaaaattgtcatttctaatatcaagcattgtatttttcataaacactaagaagttccaaaatttttattccagggtaacttcactatttttacagggaaatatctcaatctttaatggtatatcttattagtaaacaacaaatatgaatcaataacatcaatagtaaaatgtatttaaaaagaaatacgttaacatccatgttcgggggtctgcactctagggggcccctggtagtggattagtatttttccctggtataagaagggactttgagagaccatcccacatgaagagatgcactcatggcctgaacacatgggggagggcctaggcccggcccaggatggtgtggtggactttggggagacccatcgagggccctaccctgcctgggaagtggagggtggatggggtggggggcaggtggggggtttggaggagggttgtgggggagggagggagaagggattgacatgtgaagcaagcctgttctgtatttgaactaataaaaaaataaaaaaagaaatgcattaagtatttcttcctttttaggtttctaaaccttaaataataaaccattgtagcatctaaaaatgatattataccatcatttcaaaaataaattcaccaataattaatctaagactacagaataaagatttttttttcctccatgtgcttatggcaagttgctttctagtgtacagtgatttgtgctgtggttgaattgtgggttggcccaaattcttttccagccattatcccttctaaattaaacgtgaaaatatatatttacaaataaattaatgtgagttggacaaatgggctatccgatgaatagaagggaagtgaaagtttaaaggaaatgtttactcttgatatgattgtttttgaatcttgttttgattttttttggaaattaactacagaaatataacaggcattcagaaaagataaatcataaatgtgaaatgttaatataatgtgttaagcaaatttttctatatgaagttaatggttaatattattcttactgatttttcatgtttctgtatctattgttcttttatgaagaggaaactccaagtatcattactatgggattcgtgtgaagccagattctcctcttaatcgtctacaagaagatatgcagtatatggctatgagacagcaacccatgcaacagaagcaaaggtagatctgagttattgttgtgtcaaagctactacatacatcttaactccataggtcttcttatttctgaacaaacagaacaaacaaaagcacaggactgctgctatcgttggcatgctttcactgtggttagtgcttaaatatcgcttagaatttcagtgattcttttttcaaatttttaaaaaagaacttgtccttcaacttgttgggctctttaaagttaaatgtgatatcccaaactaatgttcaaacaaggaaatgacacacaaagagtaaggcgtccaccccaggcaaccaggcaactagcacctttggagaaacttaattttagtgttcatgagacttgctattgttacatccgaaaaataatttttcaagttttatttattgtatattgcaagtatgagagagagagagagagagagagagagagagagagagagagagaatgcatgcctgtgtgtgatgtatttgtgagggtgggtgggtagaagtcagagaataattttcaggatttggttcttttcttccaccatggtttccatccaacaagatcatcaggcatgcacagcaagcagctttaccttttgagccatcttgctcatcccaactaagctttttggatcaagtctgagttcttgtacaatctttgggactccttacaattctttggaatctaatattcatgaacatagaattgtagacataagagctttaatagaccatgtattcatgggtggatagataaacatgggtggatgcaggatggatggatggatggatggatggatggatggatggatggatggatggatgaatgatagaattatacttcttggaactaaaaaaaaaaaatgtcttgtctgtgctcataatccttgacaatcaacacattagcagccatgttttcaaatatctcgaaaaagttaaatggaatttatatacccttacactgtagttaagccaggagccttctagtcacttaagtctgtcacaacttatagtaaataaaaattttaagaactctctctctttaccagtgtagcttacccatgttctgtagttacaactattctttacaactgaagtggtagaagtaactaggaaaacatggtttcactaggttcatcatcaatctagttgttatttgtatatgcaagatctcattcatgagttctaagtcatagaaagaaaatgtcacctaataggttttctctggtcagcaaatgttgattgaagttctactgtgtgctgggctctaaattcaagaatatgatagtctctacctttgaaaagacaaagtatgtgaggaacgagagtgctaaaataacaatatgttgtgcaaaaattctgtttttaccaaagaattatagaatacagagtaattgagcaaattctgtgagtgggaggactaggaaacttcatagataaaatgctatttgagtagtgacttagagtgagaaaaacacagactacctaggcagaagggaagtattcacataaccacacaaggggaaggatggtgttgtcagcagtgacccatgatttggttatgttggtattacagaaggagagttgaaaattgctaagttgcctagtaagagatataatttatatagtagtctgagtcacacattaagttatttagttttgcattaatgcagtaagtttgtttttgtgtgtgtgtgtaaaaaatggctttaaagctatttaaagctttggagcaaaacaatgagattttgattttttctagagagatgactttttgatttggggcaagacatatttaatgagaggagagtgcaggtaaggactgttgctaagtggtttcagcacagttataacgttcaatgtgctctagccttgagatacaactcaaggggtcatcacatacaggtttttcacccacagattgtgtttaattgctagttaatttttatctgtaggcagtaaaatgaatttaaaccgactgaaaaatagcaaaataaaacatagattagtaccatgtgtggtagcaatagtttatatgttataataaaatattatgatcttaacttttttattatttttccacttattaaaggcatactttataaattttactttctgctttgatctctatcccaaaacttatcagcaatacagagtgagataatggtaaaatcaagaaataatgtattcaaacataaatacaaacaaaagcttgacaaattgtacctaattaaagccagtttctttatgtgatttatgtttgaggaaacctagtcagctcatataaaaagcaaacttcctaaagacagtctatataaaaagcatgaattggataagcaaaaactgtttgtatttttctttttctttatttttttcttttttcttaattatcttctcttaaagagaatccagaactataaaggttaagaagccatgaaaacctttggtatatatctccaggtggtaattgctgtaagaaaaagataaaatgtgaacatgtttatggagatgtaaattcttattttatgaataaaatatgccaatactggtgttttgtggagtctgctttcttatgaatgaaaaacattagaataccaaagcagtactggatttttctttcctcttatagcattttttaggaactgggtctcactatagagtcttagctgacctggaatttaccatgcagcccaagctggcttcagacttacagagatctccttgcctctgccacctaagtgctggtatgaaaggtgtgtgccactatgcctggcaagtctcttgttcttcaaatggcatcctgataaatgatggtagtgttcttgtcgttaagtacataggctttgtactgggatactccagaggcttcagcttgcagaaggagcatatcccctgtacacagtttctttccattcatctggattataatggtcacattaagagtatttattaaaaatgatgaaaatagctatttccatcatttatctataacttttaatgtctgatgattccaagttttgaatgattttaataaaattaaaatttatgtaagaaaatttattctcctgttaaactataaatgctatgtgaaaggtttaaaatattttatagcaggtagtgatatttactatttcagcatattcagattaaataccccatgattcattgatgatatctgtagttccatatattccaaggtttaaactacatgtttcacatatttttgcaagtagaagtcaagtatatgtgttgattattttggtaatttaagtttgggtatttggttttatatatctagtttgaaaaatggataggccatagagaccattttacttctgtgtaaagaagatgcccttcaaaactaccatatggagcatagtcatgcttcaagtgataaatgaaaagagttctggtgagaagcagatctgacagatatatttccccatatgaatccaactcaagctatttatctaaagtaaaggagtggattagagcctgctgattcaaaagcaaccatggggtgtaactactgacataaaaaaattataagtagtcagggtgttctgttgccttgaggctcattcagtaccatggtctatggacatacagtgaaaggacaactgaattaagaccatctcagcagccctttttactattacttcaatgatcagagttacggtagcaaaataccctaagtgccttgtgaaaattgtgtcacctatgggtgatcaaaaggagaagaatgggtaatgtataaataccttctgttgaaaataaactttacacttaaataaggtaatctcagttttttaaggaaatttacttatgtactaattgcttaccctaatttatacaacacatattttatcaagcagcaaaagaaagagaggggcaatttccaggtctgtaaactatgtgaaaacattggtttctgtgtatctttagctcttaaatacataagaaatcttggcatgtgtattttatctgttcgtccatatccttgtgttagaactggtggagaggagccatgtgcttctgacagtgtgcctgaccatttctgttcccagtagtcactctcaaaatactaaaatgcatttataatttctcaacaacttcatgcagttgtcagttgcttacaaaataaacatctaatatataaaagagagcataggattacagaaaggtaggaggaaaagatcactcaattgctaagaaaataatgtctatataggatagctcaatcataatatagcaacctggacaagaactgaccctttcatctttagtcttgtatgaaatttttcctcgaagatacaagtaactcaaacaaaacaaccctttcatttacaagaaaatttagatagccaagtgtggtggtccatgtccctacctccacctcctgcctcttcccaacgtctcttttcctttccctctccctttcacatgggagactaaggcaaaagaattgctccaagctcaagcacagtctcagctacatagtgggacctcttccaaaaatgcacaagtaatacaggacaaaatcacagtgtagtcagtatgttttaactaaggaggaaatgtgtcaccggcctatttgaatggtcccttgctaggaagaggagtctgaaagaaagatcctttacgatcctgaggcaagatgagagaggtctgctagaaaggggacagaaagactccttttatttcagatgtcagggaagacatccaaagacatttgtcattggacttttctttatgtcaggagcttaggacaggtgaaacaaaagctctctatttaaagtggacgataaagtgatcacagattctcttgatacttgtattgatgtatgtcttcattaccctgaatctcagtttcttcattttaaaatggaaataaacttcaagattatttcatagttcaagtgaaagattaaaatatcttatagctggaaacattcaagtgttattcttcttcataattatcatgctgttataagcactacagaaaaatgtttaacagtgggcaccctcaaaatataatgtctgtggcttgtttgtacttcatggatagtacttcccagctttgactaatgttactagttcatcttacttttttcttaagaacaaattctctggaattattacaaaaccaagcttggaggactggggtcattcctcttagacaggtaagaaggatagaaatctttagtgagcagctactctgttaactgtgcactacactctgggacatcaataaggaagctgacactgattgctgaagtcattatcactggtatgccaatgtagtaatccatgatgtcatgctcacatcttctgctaaagtcaagaggaccataaaaaaatcccactcctcaagaattattgaactcaagggatgtacacagtttaatgaatagtcacagtcatcacctagtactgctctaagtatttgtggaactaagacttctccaatcccattttatattttaaatctcatctggcaattatattgcaatttacttataggaaactagctccattaattattctttatacaagaatctccttgattcatttttccctagacaagaccttaggtgcttttagattttgttgatatcaggtggaacagggtttgtaattctctaaataaagaagagatgggggggtatatttttaagatctgtgtaatagaaagggctagctgtaaatgaaagtagtgccacacacatgcatgtacctgtgcacatgcatgcacacacacattgatactattgtttgcacaaatacctaactgtttaagttacacatgctaagagggctcagtgaaaaaattcaggaaattaggcttgcctgttttaatgttatatcctcaatacttagaagaccatgttcattctcatttgagacacctaccccataggaactaaatttcttgcattattgaaaatgcagtactagtggatagccaagtattctgaattaccaataatagaaatgaaatcctatctttagtcagcaaggttggtgttatgtcatttaagtatttagtgtgacttctaagatttatttattcttctgaaagaatggatctcttcacggtcactatttgttctgattcattcatgtttatgtcacctggcttatttccaatatcaatataaaaaccctagggcaatttttcccaaagagaattacaagaaaccagtagaaaattctaacctcttgctattattgctagctgggcaatttattatttgttcatgcaaattactttcattctttcaggaattatataaacaaatattaactgccaatatagttcttatgttgccttttgcttgagcattttcagtagcattgaaaggacttttccaaatgtttcatttggtgtggtgaaaactccttcagtaatgatggctacgcagcgctctctgccttccactgggctgtttcagtgtctgtgcttgtgagattattgacagaatattacatctacagcagagcacagctgtccaagccctaaataacagctacagctaacctcatgggggcagattcctaacagttttccaagttttctgggttagttgacaggtttcaagcatacactcgactattaagacatcagagcgtctttcatttcttaatcattaccagtgttagctctgattgcccatggagttgcaagctgttaaaatgatcatttgctccttactaattttgaaaccacgagctgttgcctcctttaataaaatgtcggtctctcctatgaacatgcataactcaacaagcctgagtctatgatgaaaaaacttaacccagaagtaatctgcaaagtaaatgggatcacatgagcgtatagttctaaatactgaagagctcattatttcaacaggattcagtatacaggtttgttagtggtatgttttcattcaatttccctaccttttacaatacagtatttttgacgatcatttaatgaagagaaaagagaggcaaaagatccaaaataattgtttgtttgtttgtttgattgtttgttttttgaggcagggtttctctgtgactttggaggctgtcctggaactagctcttgtagaccaggctggtcttgaactcacagagatccacctgcctctgcctcctgagtgctgggattaaaggtgtgtgccaccaccgcccagccaaaattcatcttttaataataaaaagataattgaaatttcaccagaattaagataatgtagaattattatgttagatcaataaaatattttaaaaacttataaatttcacctggctaaaactgaccctgcacagggccatatcacatgtaatacccaattaatgcttgataaaattgatctaatatgtgttatgattaatttataatgtgatcttagccattcttttaaaattattatattataggaaaaatgaaagtttatggattttttttgggcaatgtgtgctgtctgaagttgaatatttttctataacatgggactaaaggtgtctgttttgagatgagaggtccatgtggactaggtctgtgcaagctactttaggaaatctcttaggagtaaaaccagctccaagccccattctcaaagactgttaagtgggtgtcatcaagaaagactatatttctgtgggaacttcctaagtattggtgaaaaagcttcagaatggctgatatgtttcatacttagctatctcttctaggaagaatcagcaatcatgagtatatgtctagcctctgttgaatgtaactgtctgggtcctcctgctttgggaaaacccagacagctgcggtaattgatggtatttccattagaatcaagagaatgaacatctgatcttcctgagtccaaaatttctgactttgatggtttcttctgaaccctgacccaatgctagacagtaatacactgaatatgccactatgagtcttttgctttagagagaacaaggagagcaaaagttagcaccacagagaagctctttcatacatctatgctcacactagccctcttggccatgagccatcttccatacattactggtatcattcttcatggcatagacccctcccagaatttgccccagacctttcagcctgaggcacaaagtttctgacttacctagtttaccatctttgtctgtttttcaacccactgtttattctgctgttgttactcttaaggttataatgggactactcatttcccagttctaattgtattttctggttttgctctttttttttcctaagtattaactcaaactatttttaggacatatatgtatataaaacccctttcctcctgtcagctgttttcatatttttatatctcctacataatattgtatacttctaattagtgtttccaattcagtagcattattagtacacagtcatgtgttgtaattaattgcagtttgattgcatattttaggatgtaatatccctttcttttagatacattcactgcttatgatacttgccagggaagcaaataattttgcttttagatgggaggttttctaagcactttgtgaaggtagattgtgatgtttcatgtatccttggaaaatgtccatgagtagtcgctattatttcctttcagattaaattttgcttgtcttcatatttatgtttataggactgaaatctttgtagaacaaaaagagcagattaagaatagttagacaaaatcacagtaatttcataatccaatactaaaacttaataattttgaatctacagtaaatattgccagattaaatcattcaatttaactattttaatgtaagataatgtacttaaccatgaggaaacatgcttaaaaaatactattttattttttcatatgaatttttgtgtctgagaaagttcagctgaaagcaaattaaaccctgaataaatcaatgaggaaacaaacaaaactttcctaatgaaaggaggaggaaatcattctagtcttttatcacaaaagggcaagcccactactgccccacacaggtgcacagcacacctgccagggaaagtttctaaaatcctctaccatgagctgctattaaaagaacgaccaggttccagttcctttctgtcattagagaacaaaaaccagtattttgtacttgaggaggatatcactaaaactatgataagggtggagtttactgtgcccttcgtcatcctttgtcctctgactatctttttcactgactgattctcagcattgcttgtatggtcttcactagatccaatcatttactatcttttgacagaattgagacattttaagtgtgtccttttcatgtgttagggaccataataaccactatcagggtggtgaaaatgttaagttcctttttttaaaaagtagaattacaaaggggggcattgaaagacaaacactgtaatgtgagtctttgaagatattcctagaaagttaacttcatgatctttatttttgcattttttaaaaacaatacctgaactgaagaaaagtatgttttaaacaaaagaaaaatatgcttgctgcacagtagtctgtgcttgcttgtctggggagatttgtggggttcttggtggtggtgctgtgctgatgcctgtggtagtgtggtggtggtggtggtgatggtggtgtcagtcgtggtggtggtgctggtggtaaggactgggtggtggtatattgatgattgtgtttgtggtgatggtgctagtggtgattgttctggtggtgtggtagttgtgtcgatgcttgctgggatgttggtgatgtggtggcggtgtggtgatggtggtgctgatgttggtggtaagatggtgaggtggcacagtgatggttgtgttgagggtttggtgcaggtaaggtagtgatgtaatgatgtttgtgatgtttggcctccaagaaatctgtttttgcctctatagctagcacatttcctctatattagtaaccaagactgttcataaagtttagagctagggcctaaaagtatattgttctctggctttgattattttttgtgtgtataatttttttcctgttcttgggaggaacccagggccttgcatttggcagtcaagtgcccaaacactgagttaaatcccactgagtcttcttatctctaattagataaagtaggtttgtagatgacttcatattttgttgcaaactgaagcttctggcatttgtatttgtggctgttgataagaatcaaaagacataaatgtgttgagatgcataggaggctttaagatatatgaagagcagtatgataagatttttaaattgatagtattttaaatatatgagctggaagccctttgttcctttgcaaagatcttggttcaaattggaatttcaggatatttacgtttttaccttaggccagtggccactgcaagttctttcacaataccccatgagcatctttgcctccattgtccaaagaaatgcttcacaattctttcattcttacgtcaatttatggattttcacaaatgaaatttctttctgattgctcttccctttttcttttcacaattgaaaaagaaatgtctgcccatgacttcatgagagtatcaagaaggaatattcgactactatcttgagacattgacagaactagattaaaatcaaatgccttaaaactttgggtagtacaataaagcaaggaataatttggtttgtttgttttttcccgtctaatatttttaggtacaagcctatgcagaaagtggatggggttgcagatggtttcacaggaagtggccaacagacaggcacatctgttgagcaaactgtaattgcccaaagtcaacatcatcaacagtttttaggtatgttaaggtgtaatgcatagtgcatagtagttgttattaggattttgaaaagaacaacagtagtctcttctccaagtagaatgtcttcagatgttaattccttataaagggggaggtgatttggtgctgaaactataacattaagtgatagttctagttcatctttattgaaatattaagctgtatggaatcttgaatgcatctgccttaaaagctcaaggctatgaaagtgttttcaagagtttatatcacaattggcttttgtgatcaaaatcatgatgtgtttatttcagaaataatgtccagtctaaaagaattctcatttcctgtgtacaaagttacatatccatagtcttagattagaaaaaatataaacattttaaataatttattcttttaaattgattacagtggttcctatttttataattgtatagaaagtgtatacatttcttgttactgaaagtgtttggaagtctaacttaaacatttgagtatttaggcagaggagcaaaagtggtagtttagttgacagctattctaaagatgagtatgcactatcttcaaacagtgggccaaaaataagagattttattggtgtgtgtgtgtgtgtgtgtgtgtgtgtgtgtgtgtgtgtgtgattatgtacctgtgtgcatgtgtgtgtgtctctgtgtatgcacttgtacatgtatgtgtctgtgtgtgtatgcatgtatgtgtgcctgtgtgtgcatgtgtgtgtgtttatgtgcacttgccagtagagatacctggaaaagactttgaggttagaaagctcctgagcttgacactgtagtggcagcatttcctaaaccaaagtgcccatatgtagtcttacggaccattgaactttaaaacaatattaccttttctttcataggtataaatgacttttaatatccaaaatttaaaaacagggttacacaaagaaaccctgtctcaaaaaatagaaacaaagcatatttaggtttcctagaacttagaaatgaagattattatttaattttgacattatggtaaggaactcactaaagtacattactaattgtccaggactaatgagaaaaagagagagagagagagagagagagagagagagagagagagagagagagagagagagagagagaaagcgagagagtgcgtgtgacgtgtaatttatagtgttattaagagagggctaaatgatgtttctgtgcaacatcaagtgtcatagttatttgaaaaaagtgtattggcataggtagccaccaggaagagcagattggtgtaagtgttatactcagaggacttgtctacagcaattgaaaccatgtttatgtgtaagagataagttgattataggatagcatcatccatcacatcaaattaatgttattaactgaatcttattttttaactttttgtcttttagttttataaccttcattttatgatcatgtaaaagatatgaacataatgagtttaaggttatgtttatttttatgtggttggataccataatactacaaataactaaaatttttactggcaagcttcggttgtttttcttttactaagagcctatccaatccccagtttaattggagtaaagcttactttatatgaaattcacaagtagactccattcattcgtatgttatatgctgataatgttgtaagtctggctgaaaaatattaatttgaaagtcagtgatctttggctgtctgatctgtaaattttctttcctttttagttttctgaaaattcccctcattaatctgtaattgacaccatccacaatagcttttttctgttgtgttgtcatggtaacagatgcatctcgagcacttccagagtttggagaagttgaaatctcttctctaccagatggtactacctttgaggatatcaagtcactgcagagtctttatcgagagcactgtgaggtaagaccttcaaatataatctgagcacatgctatgttttgctgcataacttgttaaaaacaaaataacaaagatttttccctagagaacagagaaattctagttattttagttatttattctagtttaacacaaataaaatacttcttgtctcagtggaaagtgaggaaatgtgagaaagtgataatatattttattctcgatttcttgaactgatcttcattttttaatatagcagttctactctgggtatgtctacagaaatacttatatatgggtgacagatcaaatgtacaagggagtttattgcattattctttttatttaagaggttgcttacttttaatttaagaggttaatatctaattgggagagagattaagtctgctatagtttataggtttgattgctatatacccataggactgaaaactctaaatatactgaaaggaaatgagttccagagtttaatgttaaagcaaaaacaaacaaacaaacaaacaaacaaacaaaagataaagaaaattcatatgacatgttggcctttgaacttacataaatacctttccaaaaagaaaagtaaaatgttaataatatctgtgttggtttgaatcactcatgcccttgggcatttaagcataggctccagttggtggtgctgtttagaacagaagtatggccttattagaggtggtatgtcactggatgtgtgctttgagtgtttaaagacttgtaccatttcaagtttgttccttctgctttgtgcctgtggttcaagttgtgagccctccactttctgttcctgcttccatacctttgaactgtcatcatgaactctaatcatcaggaaccacaatctcaaataaactcttctatatgttgctttggttatggtgtatcatcacatcaatagaaaaataactaatacaaaaaaaatggttccagagagtgggttattactgtgaagaatctgaccatgttgttttctggaggagagtggaaggctttggaattttgcactataaaatggttgaaagctataaatagggcttaatgggaccagtccaataggatcttggaaaacaacagtgctgagagataagtggattgttgaggccaagataaaggggtttcagagaagaacaatattagtaactggactatagactattcctttgatatttatgcaaagaattggctactttctgcccatgccctgtgaacttgcctaagaataaatttaaatgtaatgaaatgattttttttggtagaggagatttcaagatagtctaatatcaactcaatcttttatttactagtaatcactcttaagtaggtctataacaaaaaatggctcagacagaaatataaaatatacagaaattaaaaggacactagtaatcttaatgttattgccaaggcttgaactttatgagagactgcaattgttaagaagattaggaccatccattaagtataggtcagatctgcaatccaataaagggaggtgtcctcatggcaagacctcatccagctaagcttccaacttgtgaaggaagtattaagtgttttctcaggctcctggaaagtaacttcattcaaaagctgctgtaatgttcattgaggggaccatggtacatcccacgatgacagccagacttctcagtgttgtccatgtgatgttggcttcagagccatgaaagataaggaggttgtaaaatctttctctgtggtttcacagggatgctgaggccaggcaacatgtggccaggagtccatgcctcgaggctctgtgaggggaaggggccctgaaagttcattgtatgaaactgtgtaaatgaaccctgggttgtgctggagaccataagatgttggagatgccagagtctttagacacctgcaaaggaaagctgcacatgaggcatgaaacagcccaagagaaggagatgtatgttacaggcagcagagttggaggagcagagtataccggaattggcattagaaaattttatgtttgccctgctatttttcagtcttgttttggttcagtatttcctcattattaccccacttttttttccttttggaatagtaatatatattctttgtctttatatgttagatgtatataatttttgttttataggggttacaattaagagattgccttgattctcaacagaaactctggacctttaaacagtattgtgactgtaaaattactaggaatttaaagttgaactaaatatagtttgctttatgttatagctctgctgttgtgagggccagagagtaggatgagtggtttgagcgagatatcccctgtagttttgagcatttgaaagcctggtctatagttgtcagtgcttttgtggagacttaggaggtatggtctacttggagaatgtttgtcactggaggtgggccttgagagtttgaataccctcaccattttgagtttgttcaaatgagtttgatttgtgcttgcaattcaagttgagccctttctttcttgctccttccaccatgactttgctctgcaattattgtctctaatcttctggagctataagcccaaataaactttcttctgtaagttgccttggttttatcacagaaacagaaaagtaactaatgcagtacccttgtaaaatcaaacaaatatacatataaaacaaaaactggaatccaggttcaagagagagagtctggtggaccctttgaataccacaaatgtgtgcttctattttaaaatacttagtaagaacttttggtcttctttgtagggatcctttagactgctttgagaattgaagtagctttatctcaggagtacttgtgatttgcctacaatttaaggattacactgtgatgtctagagaattccttccaactgctgagagtgagggatgaaagagtaagtttcatcttaaaatgtgtgaaggctgtttgagggtttggttacttaaggcttctcttgatgttttagatctactctccttctcgtgtcataactagtggcattgtctaggaggagactttcctccattccagtgtagtaatgcatcttacattccccttttagaaagaaggtaatatattgcacagagtttcttaagtggttttagaatttaagtagttttgtctcgggaatatttgtggtctgtctgcaaattaaggtctgcctgtgatttttagagaaaccctcttgcctgttgagcatgaaggatgaaataaggagtcagtttaatgcatatatagatgttctcccattgctccagaaataagattacttgagtgaacccaaatgcttgtcagagatgcttggttaatgacaaccaaggataaatcctcttcttatcaacatgttgcatgacacagtgttcttttacctgtcttactcatttccaacaattccgcatgatataagccatttagtattcatatcccttcgactagtatgttttcctgaatattggaattattgtacacatggaaaaaatttctcttacacctatcacattaaatgaaaaaaatgtgaaaatctttaaagaattcctcatttatctgtatcccgataaagccttctataaacagcttagcttgaacaaatataattcagattttgagtgactcatatttttattcagagtgtaaattggcatataattatttacattgctaaagagtgtatagtgagatcactctaagcaacagatgcctccaataagattaaaatagtctttagatgataaaattttcatgaaaagtccaattgtaatgaataaataaactttatgtgaagagttggggtactcataacataattaatcagtgaaggaaatgacagtccacaaaatgaaccccacttatttctaagttatcagtactcatgccacctctcatggagcagagtggtatatttagaaaattataattcgatttttttgttacatgtcaaaacattttaaataaagctgcttggatctcagaatcaatcctgtagtcatttgtcataagccagtttaatatagagtattttaatttttatttgcctgtacgcttgaaaataatagtattttagtgactcacaaaggtgccttaaatgaggctggtgttagtgtcattttcaaagagtaatttgagattaatttgaaaatactagatttatgatgtgctgatattcttactttgttttacttcatattttctatagtttttattttaggataggattattctgctgtttggaattcttgtaatgtatctgtcaaggtatttttaagtatcactagttttcatctcagaggtatataaagtattgacagcctcatactttagagatatcacttggaatatacctaagctgcagttaaagccagatataagagcttccttctggagaatgttttgatttcatatgagatgagggacaactatgtttactttgttttcagagcttgtcgttggtatatgttttatgttttgattgtgagcctagcctttaatggctgagccatctctctaacccttaggtaatttttaatcttacagaaaagttccataattaacttagttcattttcacatctgccaacttacagaattccctgctatctctcagaacatgccctccatgcacatgcttaatgtctgaattagcctcaaggtaaggtattctctacctcaggcttcaagccagatctacacaagtggcacatatgctaaaattgtgaaattccagtttactttttctaaaatactcagatgaactctcaattgtccccattttctgttccttctgtggacttttatagatccgtttgggaatcattgtcttaggtattgatggagtcaaacccatgctactgacttatactgcctacaagtcagctttttgacattcaacgtgattacagaattaaattttctttggcttcgtgattgctgttatctgaagactctattataaagtggttggagtggcagactcaaatgaaatacttccatcaaaagttagatgaggaagtgatagttactgacaccatcacagaagaaaaagaaaacttgatacacctggaaaatggttctagaaactaaactaaaactcaaggcaagctggactccacaattagataacagtactcttaaactaaaggagtgtacaaaagtaatattgtatgctatagtggggaatggaaattacatagccaaatatggctgtatgtatatcccttttattcccagaaatgtattaatatctgcaggactcttgactccagtttatatgttgcctctgcctgactgggatccatgatcagcagccttggaagattagatcaaccttacccttatctgccacacatgagcaacttaccattcttaacttctgccttcttggatgaccagtggtctctacccaagaacacagatgttggaatgatttgtccttctggtgaggagtaggtgtgatggttggtttcaactgtcaacttaccaagttctctagaattaccctcaaagtgagtttcaatgagggagtgtttagatcagctgggcatgtgggagtgtcaatgtgggaatgttctgattacattagatttggattagattttaataatatcttacttaacacacaatgtgaaaaataatgtaacatggaagcaatataaattaattagataattgcttgtgttatgccttgtcatttaaaaaatagaatattaagaatataagcagattgttaatttccatttcttttcccatctttgaaatgttacatgtcaataaaggaaatgcagtatgtaaactgtatcagttattgtatcatcttttctaagtttgagtacagtttgtatcaccaaaaaataggaaagaataagaacaaaatattaactttcactaattattttttctattttctaagcctctaaagtatagctgacatactatgtatgcaacaagcataaaattcagttgattagctaattagcctatattagtttattttcttttgctatgataaaagaccatgaccaggaacacttacagaagaaagagtttatttggatttatgatccccaagggctaagaatctgtgatagcagggagacattgcagcaagcaggagacctggcagtagaaacaagaagcctgtggcttacatcttgaatcacaagcccatagtagaaatagagaactcgaaacagtctcaaagcccacctccagtgacataagtcctccatcaaggacacacctcctaagcatacccaaacagtgccaccaattgaggaccaagtatccaaatgcccaagactatgggggaagtaatacaaaccaccaagcagtccgaaatacagtatgctatttcaacatgtaaacaatataaacactagtagctaatgtttgcacttttcttctgaagttgttaaaattcagtcttttcattcccacaagaacacactgtatagacaaatcgttactacctattttcagttattttgttactgaggtattgaaatatatagtggtgttagtatttcagaatataaatgattaaagaaattattacttgattttactatatctttgaaaggtgatatattatcatttcaatatgtaattaatataatagtcagatattttattattgtctgtcctttgtgtcttacattgtcttgaatgtacaatgtgccctcagtgcttagaatcttgagatgccattttggagtcaccagatttctaaggctcgatagacacgtgtgactggtgtggctcactgcaaacaaggcagcagtcatagaaatactcaaatacatatggaatgctttagatcatgtaggaattgtagctgctttagcagaaacatctggtgataaagtaaaagaacaaggggaagtaaaggaagtattatggtttggtcattttgtttttaggcaatattggacgttgttgtgaatcttcagtttagcctgatagaaaaattatggcaaacattctggcgctattctccctcaactccaacagacggcactactattactgagtcaaggtcagaatcaatatgcttttctgattccttttcatgacgcagtagatatcacagctaataaattagagatatgtataccagttgtgaactttacctgataacattgagtagattgaccatgctaggaatgaaccacagactgctctcctgaggttttagtgtgtgtagctcccattttattgatttgggggatgatggtagatctatgtcatgctagtgcaatactatcctatctgcctttcagaccataagaaaattgtaatgtgcatagctctgggggtgtatttatatatatacatacatatatatccagccatatgacaccagtgcaatgatggtatagttctaacctcagtaatatttgataaactatttttaaagtccattttctgttttatcctcatttgccatctattcatttgcgacatttattcacaccagcaatctgagtgaaatagaaagtcgacttccgaaagcaaagctgataactctgtgcaaacatgagtctatcctgaaatggatgtgtaactgtgaccatgggatgtaccaggctttggtggagattctcatccccgacgtccttagacccattcctagtaagttaaatggagacaactacggatgcttttgttctcatacataccacccaagaagtttgggggattgatgttgcaatcaggaatgatcctaatttcatttaaatttgtcaaataaaaaacatgcagcatatagaatgttgcatggatagagcctacagtaacactatagcgaaggggaagttacctgtttgctaggcttttagattattatttttaaaagtcaacctgcagctatgacaccctcaataaactaattgcaagaacactgttagttcagtcaacctgcaaaattattctactcaaggctaaaatcctctgcatatagccaaaaaatattcaaatctctaattgcaggccattctctttcacggttgcttaggatttgaaatgaattgattgtggtttccagtagagttgaattcctttataaaaggaattctgccacctgtatcatctttagaattacaaattcagtttcctttaacactaatggttaactagtattttgagagaagaacctaataatgacacaagcattgtgcacatgaatgggacctgcgtaaatcactcagtttagcctttttcagtaaccatgctgtagcaaggcttcctctgtaattgttggtgtaaatgcaactatatgtaattgttaggggctgttggaattactttacatctatacctggatgacccatactaatgaccttaactttgaaagaaatgggactgtttccactctgacatttaaagcaatcttttatctcgtaacattggcagtatgtactttatggtattcactattatttgttataaaattgtggaaaacataaatagggtttagtagaaggaaacaggaagatattaatgtttgtatgtttatacttgtaaatatgaagatacagtagaaggtataaattcttgcatatattcattaccttaaaatagatgcttatacacatttacatattataccaatcaatgtatattaatatctggaggagaaagtaaaagcaaaagaaatcccactggcactatcttaacattttataaattgctaatgcgttccactctgtgttcaccaggttacctcactaaaaagacagattaaaaattgatgctgtcacagaaaatttcaccatgtcaatttccgctggtttttgttccagaatttgatttttttttctactctcctgctccttgtgctctgagtgctaatctctagagatgtgtaaaggaagttgcataggctagctcattagcctctgacatctggctacaaatatacaatttctctcatgagctacaagggaatgtcagggaatgcttgctttttcagggcaacagcatcaatattcattaaacgattctgaaaccatgtgcttttgtcttagcatcatatgaatttaacagttccctaatttaaatcatgcatcacttttggtttactttaagccttagaattttaagtatacaatacacttgccctttatcttttgaaaaatatgattagaaaagcagtttattctgtcaagtagtttgtctctacattcaccagaaaatggaatcactttatttctctgaagttacatgatacattagtgtgctactctacaaaagaaatttggggaattcaatttccattttacaatgaggttcaacaatgtaatgcttaaaatacaatgtagatagctgttgctgggtgtgcttgttaatgctgatcttgagcaggctgagggagtcagctctggaatagatttttaaatatcaaaccatccatttatgagcctttagaagctgtcagagtctgtctgcacaatttcgatcttatgtgaatccctacagagagaacaaacttaattttatttttttaaaaaatgtatttcttggctactagtactgcactctaccattttctgtccagatgggacttctttttttagctaaaaagtctgcacatcgtactaatttaaagtcagcttgaaacgcctatattctaaaatacattcacccgaaacatggaaaaaggaaattaagtgtgaattattgaatgagattttaactggtaacactttaaatgagaaattgggaatataataaaaggtggcccagaatatcatttagtattttaaaaaagaaaatacctaaactttttaatatgcacaatgtatctttttatattataatttcctttccattaagtttgtctagataaaatagggcatacatgaaatgctttcaaaataacataagaagttattggggggtcttttaaaattaaatcattattatattaattatagaacaaaatggaaaatacaggttgccaagttgaaccttgaacaaaattttactgagtttcaaaaaaggctgttaattttttcacacttttcatttccattcatgcctgtactccatgattctagtacataaaacaacagaaagatgcatttctttctttttttctctcttttgactatggtgggatgctttggagatttcctctcaagaaatttccaatccagtctggttaggcatctacattctttgctaatcaatatttaggcaatttcggtctctactatccagttaaatacgtttttttaaaactcagttgttttattattggggtgttaattttgtatcttttgtaaataacttgaacacactaaatttccttctgaaacctgttttggcaaaattaacaaataagaatgttatatccacttgagcatagagcggaaagccaagactttggtcctgctgtacattttcgggcacagctggccaaagtagaacattctttctcacagtatttcacagatctgggtatctaccagaccatatggaacctgcacagagtagttttgtgttatgggtgctttaaatgtttgttaaacgccctaatctactccccacagtgtgtaggaatgcaaaggaattaaaagacgctgactgggtgatgcactgagcagactcagtgagcagctcccttgtgacagagttagcaatgatgaccaaggatgcttctggtcattttgtgaccactctaaagttctgtcatgagcccttcccagtttcaagctttaatgaattagggttggctgttttgataatgctttagtaacattgctctctgtggcagcaattttatcacaatgagtttttagctcctatgtgtgaaattggaaggaatagtcatctgaaattttcattccgatagttatttttcctcttttttcagaaaagataaatgctccaattcataggctatatagtagaacacggaatagagaaaaacaaagctttgcactgtgtttcattttaactaacaatgtaaaataagattaagtttgaaaccaaaatggaaatccttagcccttgatcacaaaactcttcatgatgttttgttcaaggtgaaaagccccataaagtgtattcacaactggtatatgttgccataagcagaaagatttgaatgttttcattttccaacaggtatcatcagtgtctgagaacaaaataattttaaaagccaaaaatactacttttagatactctaagaagttagaaataatgttatttttttaatcaatgaagataatataaattctgctctatgaaataaaagtagtataaacatatgtttcccttgttccagcataaaaattaatgatcttgggtatctttattgttttgcctttattttttattatttaggtgccttgacccaagccattcgaaattttgcaaaaagccttgaaggttggctttcaaatgccatgaacaatattccacagagaatgattcaaaccaaggtatggttatgtcctttggtggtgtgtgggatggggtggggggaagagggcacctatgtgcttgattaagaaactatttcttcaagtaattttttttctcacaagtgatctttatgtataagtaacacagagttatgcagagctagctagcatacgcatgttcctcagagctgttcctcatgcctaggggattctagattccacattaccctttcttgcatgctaccttaggttaatctgtgagcatatgcccatggcaagattggatagaaactatactttcattttgctgccaaaattcacacttggggcttttggtatgtggctgtgtccaccgttagactccaacagtggattttccctttgttttgtgtgcagcgttgctccattgagatttctgtagccaaaaaatctctttggaaccacaaccactcccaggcctttctaccttgtttaagctttgcaattggaggctgagacaggaggaccatgagttcaagtttagcctgagatatgtaaggagctcaaggagagcccaagttatttagtaagacccagaggctaggaaagtagctcagtggtaacacgaacaaagccctaggttctagtctgaaaatcacagaaataaaagatgttatttgattgtgacagaagaacctttctaaagaacctttattagatcagttgtattcctaatcctgcctcaaatagctgaaatcactctccttctcagtgtcatcaagtgaatgcgttagcagattgcctgcaacattagccattttgctgaatttcagaaatagtctgggtgtttaccatggcagagtataacttctgctcttctgctgttgctgacatgcagttgtatttccaccgaactctcagtcactgagacagtttacccgacttagggaagagctttctaatcagtggcaatagcactaaaatgcctgtgttcaactcttaccactcaaatgagtttctgtacaaccttgatcaaggtacttgacctctctaattcataacatgttgagatgacatttgaacaatgtgatatatatgagacacttaacctggtatataatatgtactcatagtatataaaccacaaaaatagaagaacactttcttttcaagggtatgtgagcttgctcagatatttcatacactcctaatactgttaaatagttacctttgcagtgtcaacatattattctactcaaccaattcttcaaatatatgcttcttatgtatccataaaactcaatataatatatatttctataattatgttaaggcttttgcatattttgaaagattggggtcatatactatgtatctaacatttccataaaaactaaatattgatttagagggttttttcattatctttcaacataggctaattgattccttatctcatcaaaaaacaaatgttcccatactgatgtgctatagctcaatgtagagcccttgaccatgaggtcacaggttcaatccattagagtagagtgggggaggaaaaagaaaagaaacaaaacgtttaaggaaagtgtatgtggaataactgaatttatttctaaacattcaaatggagttgagaacaaccaatgattaagcatcctgcagctagcaataacaagaactcattaccaaatttaggtctgtgatgaacatcatcatagcattaggaaacctccttctaagtttccccagtggtagccctagaaaaggaaagagcatagcttgtgaggaatgaacactctgaccactgttgtcatgtgcttccatctcctaacattgccccaccctgactaaatctagctggaagcttgaaagcaaaggaggcatccctgccatcccctgtagcctttgtatacacagacaatggtggacataaatggaaagggggtttttgaagggtaaaaggaaatttcccacatagcccacttaaagaaatttacatcctaaaaaagggttctgcttgttggtctgataaatgtatttggtcataaaaactttgaacacccttgtttcaccatcaagtctgtcagcttgtaaactaaaagtcctaatggtaagtctaaatagcctttctccgaaagaatttctttgttcagtaacaataatacatctgtacagtttgcttttcaaactgaaaagaaatgttcttacttttctagtttctagttgtcctaaaaagagttggggaggggtgaaagcaaacatttttctacctttttagataatgtgaattcttgttgtggtcaagtaattcacttccaagattggcctaatgattgctgcactcagatgtcaaaaaaatgtgagagactgttttagtgttgacctccatatactcaaaaccaaagaattctttaagaatcttaaatgctatataatttattaccaaatgaatttgaatacatctaatgaaagctgttaactttgactgaagtatttggaggttgcagtagaaagaaatggtggagggaagaagagagaaaaataaaaaaagacaacccaccccagctctcttgggtttctataggttgccgctgtaagtgcctttgcccagactctgcgaagatacacatcgctcaatcacctggcccaggcagctcgtgctgtacttcagaacacttcccagatcaaccagatgctcagcgacctcaaccgagttgactttgccaatgtccaggtactctgcccccttgtaaactctgtcttttaaagaatagtgtattgttctaaagtaggcaaaatctgtgttcacagtctcctcaaagatggggttttgcccagatcagactacactgaacccctttggtttatggatgaagtcagctaagctttatgaactagtaggcaatggaatacatccatgttttctgtggcgttaaaatgaaaataagtatcagagtcactgaagttaggcaaaacactagactattctatgtctgtgagaatttgaacaactactttcctgctctccattttactttcccagctgtaacaactaccttagattgttgattgaaatagtgatctgtaccctttcaagcaggtacttcttttattacagtaacccaccttgaagagctaagcacctctcttgcaaagcacattgcagacacccgagaaaattctttcacttaaagaattaactgaagtaagtctggacaccttgattcaaataaaaaaaaaaaaactatatattttttctaaccctagttactctgaactttatacttggaaatgactagtataggttcctcatggaagtctaacagatattttatttatgatactaaagtaacaaagttagttgtaactatataaaactgataaaaatgaaaaaatgtataaccaacaaagtaaaatatgcataattccacacaacccaaattttaaaacttttgtgttaacaagagactacataaaaaagaaaagaaaagaaaaagacaatgcaaagaaagtgagaagcccatgtcttgtaaatgccatgtacatggaatttataaagaagtactctgcagcccattaataaaaagccccctgacttaaaaattgcaaatagataagtacccaatagatacacgaaagggtcctcagtgttggccaccaggggaacaggtgttaaaaccacaaggaaatagcatttcatgcacactaaaatggatgtgattgaagacaggaagtatcagttttggtccctggagaactgagaaattagttcttcatgagctgttgatgggaatgtaaagtgccacaaccactgagacaatctggcatcacctcaaaagataaatttagacccaccatgagactgagcagcccactgcttggcagatagccaggagaaaaggaaacatggtcacacaaattgaccaatccttgtttaaaatgcttggactggaaaatttgggtgcttttgagatgttttgacatttactagactttaccacatgattatcccttaaagtctataccctgaaatgcttcaaaacacaaaagttttgcacatccaacatcctatgtatatttcagattttgaattttcagagatcctcaaactgtacttcaatgttcatagcattattgttcaaactagagaaccaaggggtccttacctgaaaaatgaatatgaatatacactggactgttgctgagcagtggaaggaactatgaagccttgattgagctttagaaacatgttaaaggaagggacgttgttcccatttatatgagaagacctggatagacattagagacagaatagatttctgactgggtagggctgtgatattgcagagaatgagagataacagatacaatgggtacaggacttccttttgaggagaagtattctttaagtagataaatagtgcagtgtgtcttttaaaatcattactctatttacaagaaatcgaatctccacagaatgtctagctttatttaaaatatattacataataatgtttgagcttggctcatttatagtacaataaattagctgtgttcattgtgactttgaggaattatttctcatatttctgatatctaatttttcagtctcttttccatgtatccatccatctacctaccaagagtctgtatacaaacagacatacttgcatgctcacacatgcaatcatatgacctttataagaatgaacagccttagatttataaagtggtctgtattagggattaatacaggaattaatagggattcaataattcatttaccaaaattattaggcaattatatcaccttaaaaatctgtactctaatattaacttaatatctttgtgttgagaagatgttttaaaagtatcttaagaaaagtttagttaaaacaatcttgaagtcagaatagtaagacaacttttaaagaatgatttatttcaattaatatctgagaaaaatgttagatgttcttgttttaacatttatctatgtatcctcaaacctggtttcactatttttggattgaattgaatatatatacaaatgagcctacttgctggttagaaacatctctcttgaggacatctttgtatgtaaatagtcaactatacatccactactcacctccacactgcaactttgagactatcatcttcctttgttgtcaactgtcaggtttccctatgtccatcatgacagtcattagtactggaacctgtataattaagcatctgtcctccaaaacatctttcctctcctgaggatcataaagagagtggtgagccattcagtgttccccacacttacgtcctctacattctgatgaatacccaaacaggccaaattcctttctacctttcttgtatctttatcccttttgagctttgacaggcttctctagtatgccctgcttcccattccttcttcgtgaccttttcctgtcatttggaacttgtccctacctcttccaagatgaatctcagtaatcctgacaaaaggataaaactcttgcaataaaccagtttgaaacaagttgtaagtgttattattagagcatgccaagaccttgggcatacctgtcagcatatccataaatcttttttcactattccatgcccttctccacaaatatttttgcgttcaagacattttttttctattgcagtttcattggcattctttctcacttaaagtcttacaatggtattgtttctaaacgttctgtgtaaatggtaagtttttatctacattgttaattatgtaggttctgatggttttacctgataaccttgttggtcattgaatatttgggattctttttttttgtttgtttgtttgtttgttttttgagacagagtttttctgaattgttctggctgtcctggaactcactctgtagcctaggctggcttcaaacttaaagatccacctgtttctgcctcccaagtactgggattagaggtgtacaccaccacacctggccacttgggtttctttattgaagatacactctgattttgaacttccttactatatgccatgttggatattatataagttaggaacatcttctgatgtttttagcttttctcattataaaattgagaacactcaattcttgtcaatagaattacttatggagaatgctattattagtgtgaactctctaggcttactaaaatggcacatgggtgtgaagagtgttttacggagctgtggtcttatttctcaagttaggtttcagattatcgtcttatcttgccaaaaataattttcacataaatagtgaatttgaattttgcgaaagaagtgaaattgctctgtatgcatcagtaagatcctctttgtagaaccagcacaagaagaacaaattcccttacatggtgcacagactcttccaattgtacaacagaaggttatgcagctctaaagccctatacatacaatccatatatttaatactgctgtactgtttacagagaaagggtcaaaagtaaataattaaaaaaaccttagatggggggggcagaccaaaaccctctctgggtaactgttgtaaaacttaacttatctgggtactcagagactcttaagttgatacaaaacttctgggaaccatttgacactattaagagatttttattgttcttatataaatctcatatagaaataagttaaaatatgagcaaaatgtagctaacaccatagcttattcaaactttatgctagtacaaatttagaacaaatgtctatttgtatgaaattggctatacaaataatagtgtattcatgcaatgaaacgtttattagtgagcaataaatacagctccatcatcatctatctgggaagcagatgaattgtcactgttaggcagaatattgaatagaatatatgatatttattatatttaatattaaaactatacatgtgtaagcataaatgacaaaacataaattagcatgaatagatgagtaatgtaaatgtaaagatgcaatatgtattcacaaataatataggacatagtatattttatgttgtgaaatcttgaaggatatgtgtatccaatgtattgtaactatcttgaacttctgccctcatactcttttattgtctatttatatttgtattttttctataaccatggtttagtatatttaaactttttgcaagtagtattttagaggtaccatctaaaaacagagatagaagatgctatcatcagctgagatatggaagaaactaggtttccctagaaaaacttgagtgaatgatgtggatgcactttgcctttgaaatgtctctaagatcaaatgacccttgaacgggtaaagtgtgtagggtcagcagagatgcagaactggaaacatgggattagaaatatattgatttgaaattgtcaatatgaatcagcttgacccctgagattacacagaattaaggctgcatacactgttttcatgaaaatatcagtgtattctatgtttatgtattagaactttacagacactccttcaaagacattcatcttaaaagttatcatcatgaatcccacttaaaaactcttcataagtctcgtctgtcagatgcataggaaaccaaagcccacactcatctaattaattgtttgaacttagtttggcaaattagggcctgagcaaaactggtatgtcttttgattgtcaagcaatgtgttgccaagtaattatattttgatcctgagagaagagattttcttttaattttaaaatactgcatagcactgaaaacaccataaaatttacagaatcacagaaaagaaactttaaaagttcctattttcattgttgttacaaaacatgaagcttcccaaccagaagcagaagggaaattacagtaatcaggtttcttggcaggtagcaagtctacattttctcaaaagaggttttgttgttgttgttgttttcagttctgtgaattaatttgcatttgttggtttgccttgatagccctcgagatttctgttcccaatctataaactcacacagcatatgcttctacctagtaccattcagggtttgtttgttttaatctttagggaccacttttggccaattgaatccatttattcctctgacttactctacatcttctaaaatggttttaaatttttatgtggtggggcggggaaactttgaagcagtatgcaccaggacagtgcctgctgctggttcagacatctgtcttcctgaagtaaccatgctagtctcttccacggcatagccaaaggagaacaccaagtcatagttaaatactgcttaatgtagtgatcgaggagaaaggctaataatccctgaagatgacaaaggcgttgtgtctcaaccattgttcatgttcatgattcacttgtttctcccactgaagccttctgtgtgacaccctgcacatgctctgtgctgatactcagtgagaggctgctgagttgaactttcctttctctctgtgacctgtcccaggagcaggcttcctgggtgtgccagtgtgacgacaacatggttcagagactagaaacagacttcaagatgacgcttcagcagcagagcacactggagcagtgggcagcttggctggacaatgtgatgatgcaagcactgaagccctatgaaggaagacccagcttccctaaggccgccaggcagtttctgctcaaatggtctttctacaggtgacatcccaagttcgctaaatttcttcatgttctgcaaatgtgtgtatgtgcccactgttcacataaaaaagaagtgagctttagacttggtggaatgtccaactttgtgactatgatgcatgtagactaagcaggaagtttataaaatgaacctttttgctgggaaaggaaaccctcttgctcgaagccaagaagttctcagatagtaatctctgagagtccacctaaaataagaattttcgacctgtgggtcaccatccctttaggggtcgaaagactgtttcacaggggtcacctattaccatgagaaaacacatatatttacatatgattcataattgtagcacaattatacttatgaagtagcaatgaaaatacttttatggttgagggtcaccacaacatgaggaactgtataatgggtcacctcatcaggaaggctgagaaccactgctctagacatgttttgcacaacagttagaaaaggtgtctagtgccccctctgctcctaccttattgatgtactgccctgtggagttatgactactattcctttgttccttgtcaatggccctcaaactgtagtcgctagaccatgaccacacagacacatcataaatgtgtagaccatgaccacacagacacatcataaatgtgcatcgttaggccacttcccaagtctactcgagtcagaatccattgaggaaaggcctagcaatctgagctttgaaatcccctaggtaattccagttcacactcaaactacctagtttgtttcttaattatgtcaattatcagagagcagagtatatctgaaagctgtatatcccagagcaacatttatgtgtcctttctaacctttggttacttctgagacccactgactgattctcttggtggttaggaggtagttagtagttgggaggataattggggtcatttactttctcatcattatgttgcatggctaggatctagtaagtagtaacatgttttatttataatgaacctttttgactaaaatacttcatatggaaatccatggttttgtagacattagaaacacccctaaagggaaagagttaactaattatatgatgcgtaatggcaaatttggaatgagttgttgccaccaaatctactacaggatttgaaaagagattttatgagctgtattgatcaagacttgtgccatatttgcataagatggaatggtcaggtgaattccagcatggagtctgtcaggaacaaattatatgtctcagaagatacaggttttaggtccaagtcagtgggattgccctgaataaggaagcaaacacttgtatttttactacaggatcaaataccaacatcaaaaatttaaattatctaacttatctcatgaaataggagtctatctgtcatataattcaaaactctgatttggaaatatattttcttttgttgttattgttgttgtttttggtttttggcttttgtgagacagggtctatctacatagctctgaatttcctggacctcactatagaatagaccaagttgaccttgagctcacagagatcaacctggctctgcctcccaaatgctgggattaaaagcagaaatatattttcttgattgcttgagagttgatgttttactcatctgagttttcatagaaaataatataagtgatgtgtgtgcccatgaccagtggctgaaacatcacttatactacctctttccaaatcttacatgatcaaaggcagagtgcccacaacttatacagcggtgaagaaaagatgctcaaccccttcatgttgtgttctgtggtgaagaaaagatgctcaaccccttcatgttgtgttctgtggtgaagaaaagatgctcaaccccttcctgttgtgttctgtggtagtgccaagcttgcccttacttctacctgtagtttgttcctttttttcctatatttagttgatatcatttcagaaatacacccctggggcctttgtcaccacagagatctattgcaggaatcctgaaaagaaagaaaattacacacttgtatttcgtgttctttgcagatacacaaacccagtagatcatcatttgcctgccctctgtcctccctgagttggggataattggcttgttattattagacacgattatagttattattttcatttcaaaaagatttgaaggcttacagttcagggccacagaggaaagagacatctaagcagatgcatacctcctgctggtaagcagaggaatagctgaactgccttttagtatagcatgagaatatggtgagtaatggaaactgatgcagaaataaatcatcagagaagcaaaattgaagcgttcttatgttttagcattgtaaatttgacagccacatatacaattcctttgtgtttaaaaatcagattgttaatctagtaatttctaaaattgtgtttgcatttacctacatagacacatagaaacaaactggcagtctcacagcagtttgtgcattgctgcagacagactgctccatctagagctatctatgtacttaaattggctttgaatggctggtgttgattttgggaagcccagaattgaaagatgtatgtggactatttcttatcttctgtgctttgtgaataagacaagagagcatccctggtaactacagtaaatttcattcaatcatccctgctatatatggtggggaagaggttgctgcaattaaaactaactttgctctttgtctaaatttctacaattagaattataccattcagtgagcttacattttcataaatactgctacattccttctatggaagcctcaggaacactagtagagaacactagcaataggtaacaggtgttctctttaattcaatgtgtttacttttgagtaatattagttttatatttgtatctttgttagccatttgtcattcctggactgtgttttaaatatctactgactttgttcagcaagatgaaaggagtttaagtgcctactccacccttggctacttttgaagattgctgactttgagttcaatgttatttgatatgtaatcattatgttgctttttgttgttgttgttgttttgtgtgtgtgtgtgtgtgtgtgtgtgtgtgtgtgtgtgtgtgtgtgtgtgtgtgtaggaaacactctgctttaaatttttcccatggaaaaagaaatacttacttttttaaaattactgtgttacattcttgtaaattattttacgagtggatgatgatgatgtatgactgaattttagtgacttggcacataaatgaagctattcttccatttgtaataattcacttatgcattagagttgtaaacatttaaggaatgtttgaagtatttcattggcacaaagaaaccattacctggaactgtttattataatcaatatatctttattactctaatatatgcaatactgtagtaatgaccagttttgttaagagcccacatatgttaggcatcctgacctgcatggctggatcctggaaaccttactggcagtgagggaagattaagaaagacagatacagtaattgaaacctgtgattgggtggactgtgcactcagatgcaggcactattccagatactcagcatatttatcatgaaggaggaagggatctctgtaggagagcagtctcaagtgacctgaacatgaagttatctgggatgaggaatctgtgcttagtaatctttacacatactgtttttagctaaaggccaacatctgtactcagactacaggaaagccttgccatttccctgagcctaaacaaggaagggcttgctgtttcccctgattcagagacaaggaagaacctgtcattccactgaacctgagatattagcatccttgacatggccattctcatgtcatgagtgctcgtttatactggagtgcacttatccatcgtatctatgagggctatattccacattttcagtagatgcctggaaacacccattactcgacctaaggtataacaccttgagcatcttgacatcagcatttatcataagatgtggcagtaacttttttagtttgaagtatgacagcaaacctagaatggatttatttccctttgtctcagttgcacaggtaggagatgcattctttccatcagtctcatctcagaatttattcatttttccctaaagtcaacaacctccactttcttactgatggagccattttacagtaatacggtattctgactctccaacatcactgttcttgcactctggggcctttatgcagctggacttgctaggcaaaaggatgagatacattccaggtggcaggagccagagagtagatttcatcactctgtgcagaaggacatgtggtctgaaacgtgttgtttgtttctgggattttcatttcatattagtagactgcagtggctgaaaccaagaaaatcaaaaccatagatataaggaactattatgtgttgcttcatttgactctcagactaacttttaagccttaaaaatggttatgtagttgtaggcaagattaccaaagccacctgcaactccacacataggaagagtactgcagatttcagaccaagctacataataatacttgagccatttttgttttgttttttttgtatgtttgtttgttttaaggcatactataaatgggtctagctagacatccaagctttaacttttcttctgtttgtacaatgattttaaaaatgtgagaagtcgtctgtccaaataatgatcttcactcttctatagacaaattagaaatagcattttctgttgtgttataataaattttatttactgaattctatatattcataagttgttttatattctttggtttatttttcccttgaaataactgtgtaagttagctgaggctgaaaatactgctttcactttccctagagaaaacatcctcagggaaattgcttatttgaggttaagagtcaagtagcaaagagccagcatcagaacccagagctcctgtctgcagctgtcagctcatgatctgtcacttgccaaagtggatgtatggaatctgatgtatgtattcaaatctctgttcttactgcgtggaaaaaatgaagcagaaaacaaaagtaaagcctacttactattcttttatttgcctggaattttataattgatcattacaaaaataaggctttcatttgtgacattttgtctattcctcctgagaatataatggcaattttagtatttataggccaaaaaggcaactgagtaaaaactggtgtaaaacaaacatgcataaatacatacattattcttactgtgagtcacagattcacagctacgtttgaagtacaaaagaagcttcttagttgatacatctttggtaaagccacagttttatttgcacttatttgtatttttaatatagcagagtttactattagtattctatcaatatggctcatatttatataatatatccattacatatttatactttttaagtttaatcatttcttaattcatctataattctcatctctagtggggagaaaatcatcttaatttaaatgcaaatcaccaggaaactggaatttgtgtatttaccttccaacaaaacatgccggaatcccacatattcacctccagggaacttagcttcaatttttgtatgagatctggcacaaagtacactctaaggatcattgtcatttagagatgacaaaatgtcattcatcatcaataagatgttcactttgagttgattttctttataacaggaatgagtctccagcccccacagttgtttctgttcagttgtgacccaatgggaatgtgtacagtgggaagggcaggcatgcatataataatgtaagttcttttctaatgaagacccgcctggctctagtgaagatcatggtcaagccgtaaagagaacagagtcttttccaccatcgaaatgagttgggccaaatgttttcaatgatgaaattgttctattgcaaggtttatactctgcttgcgctttcatgtagtctcccaacataactgcttttaagcgtactaatgtgttgaaatatatcctttgtcactgattctggcttcatctccgccctatctcttgaacagctcaatggttattcgggacttaaccttacgcagtgctgctagctttggctcctttcatctgatccggctactctatgatgagtacatgttctacttggtagagcatcgtgttgctcaagcgacaggagagacaccaatagcagtgatgggcgaggtaagaggggcttcttaaactatgtgttactgtttggtttttaattatacttcaaattatgaataggaatgattgactaaagcagcttcagtcccacaaggtactgattgtgtgttttaaatcacggaattttaaagctgaagattctatcatgtcagtggaataagttttgctgcattatatgtaccctattgaaacaaaagaaaacaaaactttcagaaacacaagactttaaaaagaaaattattgagtaggagataagaaaagccaatgcctgtaataaagctaaggaccaagaaaagccaaacaaagagttaaatctgtattttgtgggctcttcctggtcttcaggaaggaaattattttgcttcagaatgctatgataaagcaataatgactgacactttttactgtgttgtctgttatcatagcactaggacccactagccagacagtctagcgagtcagtgagctctagatcagtgagaaacctggcctcaaaaaattaagttagacagtgttagtggaaaacatcagatgttgatctagccaacataagcatacagacaaacacataggaggtggggaagttgttgaagataaatactgctaaattgctgtttaataaacataacaataaaagaaataaaatcattaaaatactttaagcatccctgtaaattctactgtaaactacaagtattctaatataagtaaaatatacgtcagtcttttaaaaaaattttgtaagtgtatgagtaattttgtctgtatgtatgcctgtcaccacatgcatgcctgatgtccaaggaagccaaaagagggtgtcagatccagagactggagttgtagacagctgtgagctgtcatgtgggtgctggaatggaacccaggtcctctagaagaacagcctgtgccctttaatgtccaagccacctctccaaccctgaatgtcagttattttgaacagcatttgtaatattaaccttttcaatttagaaaaaagaatcctttgcagtctgctgatatatacattgttgtgttgtattgtatatacattgttattgttaacataacaattgttaaacattgttatgtttaaatgatacttaaaaaatatgtataaggcagagcaagaactgctgtagcttttaaataatgggccaaacaatctggatttttttttcttaaatttgacctttgctatagctgtacagatatcttcttgtaagatgcccagttggaatgaaagatttcttgcctcaaggctcaagatactgaaatgattctgccatttagtgtattgtgccacacatctcttgtactctagatcttttctagaatgagtaggataatggtgaaacagtgcatcttattgtcaccttgtggctgccttatcctgcatggccttcacttcccttgcatgtctaaaaaacaaagattgaacccatcactctatgaaggcttagccacttcctcacatgagcctgcagccaatagtaactcagcaaaagttaagtgagacactatcaacattgccacataatcattgtaatagacactcttaacctcatgaataggctgcaaatgaagaagataacttataacacaatgcaaataaattttaataaaatataggtataacaataagacataaattagcatctgtagaatctgagttctaaatgtacttcctagtctgcttgtttactgaacccttacccagtttgtaagaaaatcttttttgctgtctatattgctacaccattcagtccacaaagaaaaccaaggcgaattttctcttttcaatctcccatagcactgtagttccgaagccttttacctagcatacacttttggccttaatcctactagcctatcaaaaattatttttatctgtggaaaggagatgggtagtcaagaaacagaaagcctcccccttctccacaccaccaccactacctcctgtgctcctcatacattatcctaaacttaccctccttttgatctttggaattaccctttccaaacaccttctggacatggtagagtatgcatgtctgtatcaaggccagcctgatctatataacaaattcaaggctagcctctattgcataagacactgtcccaacaagtagatagatagatagatagatagatagatatagatagatgatctttctctctctctctctctctctctctctctctctctctctctctctctctctctctgtgtgtgtgtgtgtgtgtgtgtgtgtgtgtttgaggggggtgaactgccttgtttcaaattcacaggtaccttcacacagaatagggacatgatgtcagaatagtgtactgagatccataaaattcaccatttcctgaaactacagcaacttctttttaatcatcattaataacatcatcataaaagtcaacaattgttgatatggagaacttatatgcttagctgaattatgagcattaacttcctgcttacatttttattttggtagatgttaccatgatcccatcagcatcatctcacatgtctttctgtcttggcccatctccaatcagtcactaaaccttcctaaattcaaactgctcatagtgtagtcagtattgtcttatgcagacacaaagctgattgcattatcccctacctaaagctcctcaatatattattcttctgttagttaaggaagaaaatctccccttgtacaagaggcatctaaaacgtggccctggctccctattgtcctcaggctgtcacttcccctgccctcttataactgtgccacccttttgtgcctctccatcattagaccactgcatgggtggttcttcctccctggacccctcacttcacctttcattgcccattctaattcctactacatggtttaaataccccttcctcaatgagacccaatcctcacatactgtgttcttccagactattctctttagtttagactttcactttttattctaaagtttacacaatagtaattgtgtaattgtaattgttctccatatgatttctgtaattgaaaatttaatgcctgaagataacacagaacttttgaatcaaaggaattgaatttgggacaagccacagttctttgtgttgaaaaccagacttctttctaaaattagttgactcatttacttaacaactctgttataaatggctatgacagtaaacaaagtggattttgactctatctatcttgaaagaaattgcactgcaagaggacatacgtatttattgagcattctgtagctacatagctacatattctcagtgctgtaaagaaagggtttaggggatttggaggtgcttgaagcaggggcagttactcttgaatgggaatgccatagaaggttttcctgaggaaatgatattgaggtaagaaataaattctccaagaagatagagaatttggaggcatggtgtcagttatcagaattctagtgaaatgtgacatgaaacaactaagatggggactatggtagtttgaaagaaaatagcctccaaagggagtggcactattaggaggtgtggctttgttagagtaggtatggcctttttggaggaattgtgtcactgggggtagactttgaggtctcctatgcttaaagctatgctcagtgtggtacacaattcacttcctattgcctatggatcaagatgtagaactctcagctccttctccagcaccatgtctacctgcaagccaacatatcccactgtgatgacaatgaactaaacctctgaaactgtaagccagcctcactaattattttcctttataagagttgcagtgatcatggtgtctcttcacagcaatagaaaccctaagacaggggtcatagccagtgagatttttttcatgggaaatctgaggttcgggtaatagaaaagactgtcacattccacagtcagaaagactggtgccatacagtagccaaagatttcaagtgaatccactcctccccctgtagtcattgtgctggtgctgaaattggacacagaactgttgagtcattttcccaaagtcataggaatatacaaaatgtgctccagatcactgtctgctgctgacacagcactgctttgttacctgctcgagactgggtagaattggaatgcaagcactttagaagtcactagtccaactctgtgacgtactagtggcttttgggacatttgttttttctttattactactttccttggggctagggtggggcattcagataggtaactagtctgaaaaaagggaaagccttttaaaaaattaaaacacttaaaataatctgagtatcttttcactcatagtagctcagtaaatgaatcttaaaactaattttacattatttgagcaggtaagaggtcaacaggctttccaccaaacacagtaaacagacaaaatctatttttgaatgcactaatactcaccaataatgctgtcattttagttgcttcaacaagactgctacatattagtttgccagagagaagctacctcatagtccctataagtttcttccacatgtcagtctgctactacgttaataacctctactatttcatttgaagcatttacaactgttgactccctttttctccatttgttttgttgttcagatggttgtttttgcctatatgatagataacagtatttatttacagtcataattcatgtaattttcatgtgtttatataactattttaagtgtgcccacaggctttctgacagtgatgagattttaagagtgggtataagatagactagttacacctgtcacacacctgttaaacctgtaaattaaatttcaaaaaccataaagtattctatgcaactctgacagggcaaattgaggagaaaaatagcctttttaaataatttttgtggctgtttagaatttgtttggaaatctgtaatgtatatatcttatatttttaatatacagtttacaatatattcaccgaatatatacaattcatgctttataaaatgattcttcacgacaagaattttatattatatatttggaattaattatatatgacttctttttaatcataactatacccagatattattagttctaaaccacctcttttgccaatttttcaaaagaaaaaatagaaactatgatgtagacatggtgccacatacctgtaatgtgagcatttcaaacttggggcaaagaatggtgagtttgaggctaacctgggttatggtaataaaatcctgacacaaaatctataagtggaaacaaaatgattattaattgtccagatctgaacataaatatggaaagcaacctgtttaataatacaagctagagaaaatatttcctggattcatcaaagttagtatattcagaatgaaagtggagggactaaaaagcaaagaggagtagtaagaattcagcaggcattctttgggggtaatcacgaagtgaaagggtaccctttggaggaagtacagccattcacctaagcatggaagagtaacctaaaatcaaccaaaggcaaacagtgtcagtgagcaggattctagggtggttaggggtacactgaacatatgactgtcaaacagacaacttactttaaagcacattgtaaaaacgggaattgtattagaagttgaggtttttgcaggaaaaaaggactgtgtgtatagcagtaactgagaaaatatatggaatcttgtcaaaaaactatgttatttgtaataaagcttaccatcactaactgacaatttaattgaagtcagatcctgtcactttactagatggttttagactcacatttattagtactcccttgcaaacgatgtattattgtcaccttttaccactaaggccaataggagtggaaagtcacaagtcagaaatggcaagtgctaaaactaatggataaaatgcttcagccacactacaataaccaatgctcataatacccacttaaatttatcatcatataaattgtttgcatatttttaaatagtgattatgttattagccttgtatccatatcatataacacctaaacataaatgtgtatgcctgctcaatctctcataacatgtaaaccagatgcctagtgtgtaagattttatcattttgttacaaggctcctttcttgggttttcatggatatctcttgactatccttcatttttgcttagatatttagaatatgcaaactaaatgcaatattagtttgagcaacttgcagttggaaggtcaaatgtattagaaaataagaaattatacctttcagcatctttgtatctttgtacccccagcacacatgcgcatacacacacacacacacacacacacaccagacctaaatggatttttttcagaatttgtagtttggcttcagctctaagtctgcttttgtacattttcataaactcacacaatctggaagtgaacgataagtgtggcacactggatgagccatggaataagcctttcttataaactgccatctaccagattcctcagactggctttttgaaaacttgtccattgctcctgcctttctccaggcttgccattctgctcatcttctctttgcatatggtaatatcactcatttattatagtgcaggggatgggcttaattttgaatacactacaagtccaggtgtaatcaccagcctccctctggatcatctccaccagcctgcttcctatgttcggttctcttccctgctgtctagtagctccagcctctccatccccccacccccggcccatttatgggcatagagagactctcacaataagtattgaaaaataatcactgagggaaatacaaaagagggataaaggacagactgtcaacttacaggacatcttgttggctctcagggtatggttgtattttctttaactctaatcccatgttgcaatgccaaaatgttgttatttgtttttcactctttgctcttttggctcttttgggggtcctgccacccagcttccaaataaattacacagggaatcttattataaatgcccagccttagcttctcttgtttctagccagcttttcttatcttaaattatcccatcttccttttgtctctgagctttttccttttcttctgtggctggctgagtagccagccccttcctcctcttcttgtttctcactcctttttcctttgtctttgacctctccttctatttatactgtctgcttgccagccccgcctatcctttcttgtgctttgctgttggtcatccagctctgtattagaccatcaggtattttagacaggccaagaaccatagcttcacagagttaaacaaatgcagcataaacaaaaacaacacacattgttaaacaaatgttctagagcataaacaaatgtaacacaccttaaaataatttttcacaacatcagggttcctatataaaaattccttactcgggaaggtaaagtccccaggccaagtgtaccttcttgtagaatttttcagagcccttctccaagatgttaggcttttatgtgggtgctaaacctggatgtctggaagagggggaaagaacaaaaatagaaattcaagactgtttaaagcacctcaacaacagaaatagtcattgtagaccccaagagacatctcagtgcataatcttctgcagtaactagttagtgcctgtcactgcattaactagttaagagactttttggacctttggctgcttggagaaagagaaagctaagtgtcaggttcctggatatagattaagcatgacagtgccacctactggctcctttgttatacttcatgatcctgggcctaccccaagtgaccctgagaagttgactttattgtactgtggttctctgttgtagagaaggtggtggttgctggtcctgctagtaaggtgaactgcccatgttctgtgtgggaaaggtctttgtgttgtttatttcttctgttttgtgatgggaacttgctttatggcctccaattcatggcagtcctcctgcctcagcctctgagtgttgtgattacaggcgtatgcatggtttagagtggggaaagttcttaaggaaatgactcttttctccttttccataccatttgttttactaaaatactgtactcacaagaccaggaaagatgttctcaacaagaatatgggccaagaatgtttctagtgtaagctctacaaatctaactcacattgtcttgaagagaccatgtttccaaacctgctcaatctcattgtctctctgggtaattattgcctgtatgctagtttgaatgaaaatgtgcccctcccccaccccaagctcagggagagacattgctagaaaggattaggatgtggccttgttggagtaggtgtggccttattggagagtgtgtcatttgagtgggctttgagtttccaaatgctcaagccaggcccagtgtctatctccctgttgtctgtggatccagatgtagaactctcagctgcttctctagccccacatctgcctacatgcttcccaccatggttagtgataatggactgaacctctgaactgtaagccagccccaattaaagttttcctttataagagttgttgtggtcactggtgtctcttcacaaaaataaacccctaactaagacagctggttataatcaaactccagcctttctcttctgtaataaattacagccttaaggccattctttgctattagatattgcacttggcttcattgtgaattaatcaggtcatgagcatggttctttctcttctatacatagttttttttgttatttgcataaagtgtgttcttacagtctcaacctaacatttgcaggaccaggagtttcatatttctaaacatttgagacattgtgaaccaactataattacaatgtattctatccatctacttttaacagatatatcttgataattgaggacatgtggcttactttctgtttcttccaatgtccatgccagaaaatggagacacagatgcagtggcctctgctcttacacatctctcatttattcactcatttgttaataccttaagctagtgttcaggaatttctgcaccttgcaaatgaattcctgcctccccaccccccaacacacacagacgcttatctctgaagagattttcacaggtctgggtctggggaggaacttggggccactgggcagggaattctcagattctagaaaatagctatatcacaggaaggtagactttaggaggcaaacaggctccaaaaagaaacctccacctgaattcttgggggaggaggatgggagtcaacccagggaacagcaaagcaggactccggattaggctcaggacagactgctggctctggctttggcttgatgatgatggtaaacattcctgtgtttgaaacttctcttgtaaagcagctatggcctgtactaccttacacttaactagtgtgtggggccatatgtgcacattgccagggtgtcaggtcaatcccaaaggcggggccattagcagtcatagggtgaaagctgccattgtacagaacaaacccacagaaatcttggtctttttttttttttcagtttcagtgaaatctcttagaaaatatatagaaaggtacacatgtaggagaaaacaaacaaggaacccaataagtttccaagtaaacatcaatattccctgcagaataaagttggaaattactgtaagtcagcaacctccaccccagttgtgaaaccttgtagccatgttaattgcaaaatggtttgatgatctttcttctcatttgggagatatttaagggaagtaatgctcaggacaccctaaaattccagttgtgaaccatacctctccatcagaagcatctgaaatagttgccattacctaaccttagccttagttaatggagcacagaccactgttgagctttatgtggcttgtaaaatccagaatgtcccaaaattcaagcccataagagaaggttgaaaagatatgattgactcaggaagttctacatctgcatgtgaacaatttccctacatctctgagggaaactttaaaggccttcttcctttcctcacttctcagagtggaaatgaaagaaattagaactcatcttagctgctcacaatttcaacttgcatggtctccaccttccctgaaaatactcagcagaggtgtatcccttcccctgtcctgtccaacccttttcatggtattggtatttgtttacatcataagaatctcaatcaatgtaaaaagaaaaaagaaagaaagaaaaaaaaaaaaaaaacacttccagcccaaccctctgtggaatgtatagtgtcagcaacctcaagccaaagcctacagcctaggattcctacagccctcctcagctaagaggacttcattttgaaaccatttcctaatggttatggaaggaagctttagggccctatccacagtgatgggaaactaggtgtgaagacaagtctggctttgtctctgttcaacacctttggataaatatgcgtattaaaacttggtgataaccctgtctaactcatagataaggaaatcagaatctcaaatggtataaagtcctagagttacatagcttgtagtagcataattgtgatttaaatccagtcaagctggtccaaatcctgtgtgttcttgttctgctgcactcatcactttaattggatagctaaaaagttatatttatccttttttgaatgttagttttgtcttcagtaaaataagcctaaaaactgtagcatgaatgataaaaacccagagaaagatattggggttaaaactgaagatcagagaagcaaaagcagccagacactagagagttctcacctctaccaatgctcagaccaaaggggtgacccactaaagatgacactgcatctccacactgcatctgtctccaccaaaccacaaactccactgagttcctgtctccccccaccttatattcctctctcgtgttgggattaaagatgtgggatcccaagtgctgggatcacctttgtgtgagctctgtttctctcttagactggatcaatttcatattggtcaggtagaactaacagagatctgtctgcctcttgtctcccaagtgctaggaataaaggtgtgtaccaccactgcctgtgttctaaggctctgatcttcaggcaagctttacttgttatatcataagcaaagtatcaccacaaaagacagtttatttatgtgaatattatgaggattaaattaggtatggtgagagtagagtcatgttaaggagtcagattcagtcttgtcttccagacagtttcatgagtactacacatcactggctacagcaacaaagaccttagaaagcttacttgtgttagcactactccctgatgctgtgaggtctacactgtcagagcccagcagccagattcccatttgctggtattatgaagtagatagggtagatagagaggcagacagacacacagtaagtacttgatcttagttccattcccattccattttgcataagtttgtaaatattgaaatcctatgcattgcctaagattgtatttgattacgttttattaagatataattgattgtaaacttatactttcaagcaataatttgtataattagaccattacttttggggccaacaaaggtgaactctggcactaaaataaacagaaaaataacaaagcataatgcaggctttaataatactgtattgtaacagaaaaaatatctcacggtctttgaatacagaatcaaatattccatagaattacaaagaatccagcagcattctttggtatgtagccaaagtgataatcagaggcaaattaattcagtcatttgaaaaacagaagcaacaaaatagaatggggaaataagtcaattagaaagaaaacaccaatgttagggaaaagcatcaatataattagggttatacagtcatagctaggcttgaattcaatattaaatcatagcaatgaatgaaagatttcctatgtgattgtaaaatggcaggagtaaggggaggagtctgtacagactatgcaaaactacctagcagagtggcatggtagcatatacctgtaatctgagcacttgggatatagaggcaggaggcagaaagttcaagtccaactccagataaatagtgagttcaagactaacctgggctacaggagattctctctcagaatgaacacaaaaaggcaaagatacttgttccagtgagcaagtagaaaccatgttaagagagttttatagttcagtgggtatgatggcacacacctttaatcccagcatccagaaggcagaagcaggtagactctgagttcgagactagcttgtgttacgataaatctttccgccaaagccgcccgagcactatcaccatgtgtgctttacgccagccgcttgctcgagttagggcccaaattaatacacagagagagttgtattaggtgcaaagctgcttggccaatgactaggattctcatctgttagctccgtcttaattatcatacatctatatattttataagacttatcagactccttattggcgtccctccttgccggtggatcacatcgcactgctggaggagcaaggggagaaaggacccttcctgtttcttcttcgcttaaatatgagtctccttgctatgtcacttctgcctggatcaccacttctctactacatttcccagaatcctctttgactcctagtcccgtctaacttgctgtctcattggccaaacagtattttatttaacaatcaataagataaacatacacattccctatcaagcttgatctaagtgagttccaagagagccagcactacatagagagaccctgtctcaaaacaaacaataaaagcgggtagagaattttataactaatgtacttttggtgcctattaggttttgatcatgagtaactcacaaaatagatacatatatgtatacatctacattttcttcccatactgccagcactggcctgcatcattctgaatctatgcagactacccctgcaatagctgacaatcacggaggaagaagttctgtagctggagctttgcttactctatggcctgttggctgctggtgttcaaggtcagtaggaatgctgaccttgggggtctgataacacttactttggattctgctgtatatatggactatagtcgtttcacgtgccaggcatctgactgtgtcctctgcacagtgcagacctcttggaaccatgggatggtgctaacaaaccagtctatcttaaccattactgtgtggcttcaatgttccaggctcttcaggccttcattggatggggaatttaaaagtgttctggtcttcgaacattttggcattctcaatttaagtttctatttcattctccagactgactattgtgtcacactgacagtcttcacctctgtgatcctaataaacatcttaggtacatgaagactgcatcctgcaaagaactcctcaactgcttggtcgctatcaggttcatactcaaggcctccaggaggcctactgaagagctgccctggctgtgctgtctctctcttcccgttcacacttcatagccattgttgctatcactgggagctgccaggctgccacaggctacagtgcttagatagtctcggacttctgtgcctctgggggttgggggcggtcagtgttgggatctctgcttaggatctacaggaagtagtttctcagacaagtctttctcttcaaaaacaacagagctagttgaggcggcttctgcctgtcacccataccatgcctcatctgtaatctatgctggttctgactttacagaatttcctgttcatctgcttgacataatgttaatttcctgtgtgccctgaatggtatacattttctacaagagaacttttgaaatcccttaatttacatatttgtattcctttctaaaacatgagatctccctatccctcccactgcccaccccccaaaactgttttctccctcataactttaagaagaaaatacctgaccgccaatgtaacatcacatacttactatgtgacggtagtcagatcaactcactgttttccatagttacaggatgaaatccagttcctctgccttgacaaatgcatgttttgtttaggagaccgaaatgaaggaacaggtgcatatgtttggtaagcatctatttactcttcactgtgtgtatcagcaccacactaaggcctggaatgaattagtgacaggaaaaagtcctcatgctgtggcactgatgttatagttagaaaaatatatgttagatgagcaaacaaggtcaacattgcaggtccccacagaaggccctaggaagcaagtcctggtggctattgggagcattggggaatgaggtactttagatggagcttctaggaaagacttctccaagaaagcgtatttaagtgacctgtgaggccacgctcacttggaagatagcatactgtacactgggccaccaataagtgtactctgtacatgtgtctctgctcgggtcctttctacatcgggaaaactctacgaaagaagcttcactaatttctggaactagagctttcaaaaaaaaaaaaaaagcccctcataagccccttttgttaattctatccattttttgtattgcttctttctcttctggcctgatgcaggtccgtggcatctgcctgctctccatgcttctcctctttgtgctccttcatgcttttctgctgcttctttagttggctgcttgaaccttaaacccttacaattgatttccagttctcattcatgacccctaaggtttcttgggctgctttattttcctgctagtcaacccaaccttcctaccagaagcaacttctgccagttacttccataagagtattttccaaattgatctgattgattgactgatgacaattgggtcagtgttcaaaatgtggtaaattctcactaatatttattgagtaaatgaacaaatgaactgactctgaatcttacttagcctaactatagggttgaaattaattgctcctactatttgtcgtgtgtgtgtgtgcttgtatattcctcacatgtgacatgcatataaaaaatatctccttcacctcttcattggtttcttggatttctcatctattgtctccatttgctgtatgtgtggaactttgtcattaatcccagagatatctaagggcattatcagagtcattcctgctttttgtccatcatccagcacagaacattttgaaaagctctatttgtgtgaatgctgttttgctaatgacagtaacaataggtggtttcaggtttgggaggtgtttattttcagtcttacgaatagtcagacacatctaagttaggcagaaaatttctaaggaaaacctttgcatgtagtaataaatgactttagggattttttaaattaacaaatacaatataattggaaccatcataatccaacaattaaaaatactacaaaaatgacagttttgagtgccactataacactacaattgtcaactacccctagctttatgagatgtgttacattaaaaaatcatgtacattaaaaataatatcttaatattgccatcaggctaagtatataaattatatatgaaacaaatgcattttatgtttctatttaggccccatccataatcattatatgtttgcaaatattctaacatttgaaaaattctgaaatgtaaagcatttttgctcccaagcattcagataagtgatgtacaactagtcctcacctttttataagcagatatgtgcttagagtcatgactgccaatttgtttcaagaactagatcctaagaattattaaatgaaaatcagaaataatataatgacccttgtgctcgcttcggcagcacatatactaaaattggaacgatacagtgaagataatataatgatccttagttttgaacatcctctctctgtagtcctaactaagacccaaggtggataaataatccctttgaatatttgttgcttgttttatagtatgtgattcaaaactcatacagaatttatactttgaattttatttaaatgtacatagggttttggcccatgtacacaggatcatcttcaaaacaacagttcagtaactctgattttgttgcccggtaagatacaactgtgaagtagcgtctccaacaaacggagtaggagttacatgttaggaggtccctttgagtagaagcagtcacctggaaaagctatgcatttattctggtaaagctgcttaccagtggcttaaagatggagtggaatgcccctccccacccccactaatcttcttgtgtaacgctatgaaccgtaaggagtaaaaggatatattatttaaatatcttgaactgtggcaaagataaatttgatttgaatacggaactctttataagcaaataagaatgtccaaggccaagtgtggtgaacaaaaatatggagtcataattgggagtgaggtgacagtgtgaactttctggaattatgcataaacttaccttggaataaatggataagctcccagggtagctactgtggcacatagtgcttatttaggtgggaaaataaacaatgtacgtgtttgcaaaataagatcagttttattactttatagacagaccttgtagatgaaaaatatactcctatcatggaactctttataagcaaacttggaatgtaagtagaatttctgtctcatcctttttaagtcttttgagaaatctgaatttctaataactactttgaaaaaaatgctgtgggatcttttctaaaagcagatgctctacgtttcacttcacttctttgggattagctttgtacctccgttagtcagttttttatttagtgtatctatctttgttccccctgagagactcaaagtgtactttcttgctgttaaattatcatcaagctattgaaccaaagtagaaaggaacatctatgcccatggctattaattgttccatggtgttgagaacttctgttcaaagtgcttatagcaaatgcctttccttttcttaaaaatggggccttggtatcttggtaaataagaacatcaattaatttagagaagcttcaaattttagaatgtgagctaaaaactatttcagctctggagctcccattgtacttgtcactcccactaatgagagagtccccacaactgctagactatgctccagcaatgatgaaggtcccagctggactcactggccgagcatgaggagaggcgccgatgtatactgtttgattggggctttttccaattttatttcatcacacccatcaccatccaggtccgccaggcctgtttcttcattgctgaattgaaataaaagtaaaacggagcatggaagccaaagaaaattgttatccttgctgaggaggtgaagacagctcaattgcaacatattttaaacttcaaatttgacacatttgattggaaaattgtgtggcctctgtagttagagatcagaatggtcagcagttcacacttttaaaaagtcatggagtggttctttccacagatggatagagtgttgttttattctgacaagtagtaactgttgcacaaatgtctattattctgcagtttggcgatttaaatgctgtgtctcctggaaatctggataaaggtaagaactgaaaactttgaaggactctgagtgagatgctgtgagaggaagcagcatgactgtgcaccactcgcatcctctggacagagtgatcaagcccaggtgaaagcagcaactagttgtctctagcatcctgaatgatgctgctgtttgtttcctccatccacgtcttcctcatatgaagtggattgaatgcagatgactgaattgaaatgcagtttaaacttccttacagaagttcaatataaataaaaaaaatattgaccatgaccaaagtcctagaagaaattctaaaattggaccagagatttttattcaagaccaggcaaggaaaaaaagatcccttaattcacccatctactagtcagttaaattttcaatggaaaaagaactcaggtagtagtggtgtttattgtcaaacaacactgagcattagttcagttgagaaggataaatagatttcaatgctggcatttatcaatctagggtgtgctgctatgtatacacaatgtgtactcctgaagaaccaaatggtcaagaagacaatgcagtgaaaagaataggagggtcaaaagtgagttgagtgagactagaacacataaatcctactcaggtttataataatttttgaaaatggtgatgcaaaacatgtgtttcagtaaaccaacaccacagtgaatatagccattttcttgcttgggacttgaggaattgttatagttattggcttttctagggagaactacagttacaccttctaaccagagacttctagagaaactgaggccagaagaaggacttgggaattctgcaaagagttgcagcactgttttcctaagtgtgctgcctcaaggtttctagtgtgtcccttctgtgtctgttgagcaggaagcattgtgctagagagccatgtttgcatcatcactctgtggacatccctctctgacaagttgctgtcaccactgctcttggctcaatttctgttttagtaccagagcaggaaaattagaacattagactcccccagtatgttattgcttcagaggtacaacctgtggaatcgtagtagtacccctcaggaaaattagtgggtgatcacttacctccagccttattgatgaagtgaagaattcaaagaatttggtcaactccaggaacacctcttggtagcttttgtgcaacaaaactcaagtgggttcccagaaagggagtacagatgtctctcaaattgcattggttgtcctgaggattggagaaagagcttgctttacagattgcactgttgcttatcctgccattcagagatgacaggcccaagtcacatagataaagaaccattaagtttgctcagactgttttcttgaagctgtttctatctgcagcaagatggataaagggatcccccattctattcatccctggctgctcacagaggagtttgccctcttgctactgcttcctatatcgttttgatagttttcagtttggagagtggaggcccagaatttgtgatctgccatcacctcttcgatggggcgtagccatttctatttccccataaccctgggacttccctaggttacaaatgaaacatgaagttttgtgggtttttttccacaaaatgagttgtatagatataataaaatttggaagcagaagtgaatgttttatatgtctaacttccagaaatgggttacaagtgtcacagtattaatgttgcaagcaaagaagtcctttgtgcatttttaaaatctcatattgccacttcattatttagatttgcttagcatatgaattaaggatttgttcaatttgttgtttgctataagtcatagtggcagtagttctgtggaacaacacaggcctcaagacagcatgggcaaaacaatataaattcttgggtgcccttcaaaaccagtgtaatatgccaaagtgaatactttgtgatgctatgatttatgccattattcaatacaggcattttatgtaaaattccaaacatctgagagaattgtggctgtctcactgtagcactgatgggaataaaatctcttgagaaggaagcctacaaggttcctccccgtgggagagctgagctggtatactcaggtgattctgaagtatgtcttctggtggtatttgtttatgcagatgaaggcagtgaagtagaaagtgagatggatgaagacctggatgattcttcagagcctcaggccaaaagagagaaaacagagctgagccaggcgttccaagtcggctgcatgcagccggttctggagagtggtgtgcagcccagtctgctgagccccatccacagtgagcacatcgtcacaagcactcagaccatcaggcagtgcagcgccacgggcaacacctacactgcagtctaacagcaggaaaacaacatttgcagcttactttaacccccactgatactgggcttaagctgaaattttagcaagcctgaaggttgactgttgtcaaaagtctatctgtgctgaacattacctttttggagttgtgaaatggaatgggtatatgtatttttccaggtctttttttttttttttaacacaaattatttgccttttaataataagagtttgtaccctccttagtttcaggtgtcaagaaggaattttacaacacgtaatgttattgtttttgttttctcataattaaaaagtaatttacattttgtagcttaaaatattttattgttgattgttagtcttggtgtatgattttctgtgtaagttttttaagtagatgcacttctgtgaaatatcaaaagaaatgaatttctttgatttacactggaggcatgcccatttggcagcagatgcatcaaatttgcttctgaaaggtgcttctcattggacagaaccataagacactattttgataacattttggagtatggagagaatacagagcgtttttattatagtggtagagggttgggaaggtcatctatttttctctgaaaaaaaaaaattgagctgtgcatttatcagttcagggtaaatgacagaatggcaagagattatgctaatatgtacataatttgtgtacataactattaaaccatgttaacaatgcaagcttccgttagacattgacttttaactattatttgcataccaattcctctgtttaaagactactgattctgtattgggaccactgaacagatgcattctgctgttaagtggggctgttatagttagatactgaagctgaaaaatgacttgacttttttttttaagtgtacatgctacttatactgagctggacatacaggaaaccattccatttggatgactttcttttattccaggtcttttttctaatagtagttcaatatgctgctattataaaagaaaatgtatagaatgcaaggaatgtagcgacctgcatattgttatttcctggtttctaaagtacatggatttaaattttacacagaacctaaaggcagtgtgactggcacacctcactgttgctgaccccgattctgtaggatttggataggtggctggatggaccattgccattgaagaatgtacatcagggatcatcgtacctcggctattacatggtgccttaaaacagaactgagctaaggtttagtaaggtttattttgttcgtgtgaataactcgtcaatccatttggtaaagtgtgcctgtcatgctcagattcctgaagtaaggacaggtcacatgttcttcaaggggaatttagggggaaatgaagcaaaacaaagagacaaaaacttcagtttctctctgagtgactgtgagtggacttgtctatgttttatccttggagctgaatatcacttgattataaatcagattgctaagggtgtggactaacagactagttttcatacaaacatgttacataagcatcctatgttttaaaccattcttatctagttacaattctagaaagctaacagaatgagcaggtacttattgaagtgcatcttttcagtctaaatgtctgtgtgtctgagtgtctctgaacacacacacacacacacacacacacacacacacacacacacacacacacacagcaagagtctacagtagtatggtgagatcctaaagagcacaggctcatcacattttattttgcatgaaaaaccaaggttcttttaagcactctatcaaaaacaacaacaaaataggatacatccttttgtttaagtaactataaaaataaatcagtataagtcaataaataacaaaatcaataaagccaaaaatgaaaggaaagcacaaaatgatatatgaattactactgaggcctataataaaatgaagacttcatctttccagttgggttcggtgaagggtgtggttgaggagaggaggctacaccaatctggaaagttaaaataccaaacggcttatcaggaaacacagtgtattgaaactgttattgcctgattgtctcaagcttctgaagatcaacagcatttgttaagtaaaatttaaatgtcataaatataattttgagtgggttcagattttgcattgagcaatttactcaacacttgagtcttcactggcatccaagcatcacctcatttactgaagatccccaaaggcaatgaatttgcaaccccctcccctgcataatccatcgtaagctacaaaacaccatggatctatttcattgtgagttagaaaatgtttacacatagaatttaaatcataactctccctcctgagatcttttcgtttcctgtctctagctgtcatccccaaatggcatcatatctctattggaccaaatgtatttactggtttcactgtgtttgttgggttgtttatgtatttgtatcactgtttcatttaatttaatgttggagatacttgtatcatgaaaggaatctgctgacaatggacagatttagattcatgggagtgagggactgagtggccctccagaattcaacatttcttccatttgttcatggtttgttcaaaattaggacaaagtagaaattaataagagtaattatggttgaaattgactctaaaatattctgaaatgtatttattaatatgtagggacattaatccttttacaccagtgtagatagttctagccaatacacacaacagaatacctatggcttatgacacgtctagttattcatagtatacactcgcacacacatcaattttggatttaaattatgaaatatattagaaaacaaaaacagtaatctatatgcaggcataaattagaataatcgcatttgttgtaggcatttaacattttgtttccattttccattcacggaaactgacttttcaaaataccagccactcacagtctcctagtagacttattaacacaatacatattttaaagacttctggtatttctcggcattgtaatcaaatgctagtcttgaaatacataagtatgaaccaagtgctacacttctgatgaggaaaagggaagggaggtacatgagctattggtacatttcaccagagatatttccatgtaatacaattgactgtcataggtatagtttagtatcagcaaatactttgagaattagagccaaatatttgtgcttccaaaaccagtgaacaatgggtggaatgggtgaaccttctcctgggaacacagggcccagcttttgagggtattttttttttccctttggataccaagttactaataacttcaggatttgcatccaaatcatgtttggattgactgtatgatgagtcttactgccttttcagaaatctgcgttcctttttgtgattttccttgtactgtatagcacggttcatgcacctctctttagatggtgtactttaaaaacagaagtaaaatacacaaatggttttctcgctgcatacctaaagttagtagtgtgcaacattacctgcctttgatttgtagtagatgtgcaaaactaaacacgttcttgcagaatgctgtagatgtcaatcaggagtgggcacagcttccatgctgttaccatgggcctttttacgtggacacactatctggaagtgcctgtgcactttcagtttccgagatgattctcattattatttgaaacgtccaaaataacgctgtgcttgaaacatcagtgtcaaagaaaacaagtgtgtcgctgtgttggtcctcattacgtggacgcagtaggaagtcagaagtttgactagtcacgtttgtacacgaggtaaggcagtggttatccataacaggttgtctttgtcataacgtacccctccccaaattcttctgagcaaatcacaaccatccagagaggaaaatcagaagtcttctaatctctgtggatgacatcggagtatgggggaggagggctggcatgcagtgttgttgaacgccgggctgtgactggatcagagcaacctccatgtacatggtagaacaaacccattaacagaaccctagtatttctgcgagtctggtgatttttaaaggactggaattgaagcattaattcaatgcttagttctagtcttagaaaagccctttgctgtaatgccttgtattaaccctttgagcattgtaagatatacaatgggggatgaaagcctttcagatcatttatttagactttaaaaagtaaaatagcctctatatccaaatgtctaattacactgttttttaaagggggggtcagaaaagaaagtgtctccatgccgaacacttgcattttatatacaactcttaattttacttcaagagggcttgatatatttattcccaaatattcactgccatctaagtaagtgtactgtttacagaagacaaaatcgacttttctagcattatatgactctctagaaaaggaggacacacacgtgggcctgtgcaggcctatgttgtaactgatttctgcacactggaggtacctgattgcctttaaaaggtatgagaaaatagagggttccatttcttcttttttcccaaaacaaaagatctcgtttatttagctttagaaagtacaagtgtaagtgaagccttaggaagaaatgagttccaacgaacacaactgaacttgggacagttaggctctttggagttgcatctatcataaaatattgtttggaaattcatgtggggcataattttatctatgctccaaaatgttaatactaataagacagagagagactgagtggtgagcaaggcactcacttgctttaagcacttctgtcaggagaggctgtgactactgcttcagatatctctgaatgtcattctgcttacaacattgctggtttcttgacggaatttctggacagctgatctggtcctcctctgtgtgacaggacacagagcagtgttgtctgcagatgtgctcacactgccctcactgggcccatacgggagcataacctattctgatgtctgctgacatctgtagcatagtgcaagtgtccgcacgttgctttttaggcagttgaggaagtcagaccatgcaaattactcatgtgttaccatgcaatactcaaagggttttactttagctctcttctttttaatcttcatgatgatttactgtaaatgcttctcagtttgcatgccttgcccattgctgctagtgattttatgtgccagtagacctgagtttagtttaccaattttacttaaatagtaaaagccgcttacaaagtgactgcctagaattgattctccttttgtttaaagggattggtgatacgtctttttaaaagaaatgttttgtctcttctatttggttctgatatttgcatcttttccccctctttcctttgttttctttttctttctttttttttttttttgataaagtatgacgttgggattggaagccctgagtaatgaaatatttggtaagaatcatttatgtagctcaataatgatgacaacaaatctctatgagaagtttgattccagggaggaaagcaaaaataaaactctgattgacctttgatgaccaagtaaattttccttgaatcaattagcatttctgaacaaatgattgccttgtttttgcctaccatacgcaattttatatgatccaataaggaaggtgttaaattttattcgtttcaaaagcatcttttgtaccaaagcagattattttctctgctcatctccatcatcgatttggacctatggtggcgaccaatgagttggttccagaaacttaagtgagtgccttgagaacacttgggaatttgtgcctgaggtggtaaacttttaattaggttaattatagcgcttaccaatcagtaactccgctatcactcagggctttcgtaccttctaggtaaaacttctttcattgtcttttgtttttaaatactgtattttttttaagtgccatcatttaaatttcacttagtaagtggcagaatacattcgtcagtcccacaagcacacgacatagtaacactaggagatatttgagcatttattttacaatcgactgaatatattatgtaaatgaggtaagcaacttttgtagagattgtatgtgtgagataatgtaatgttcttttccagtttttggactacagttgaataaactttttaattatttaaaaacatctttaccgaataacatgtgatggttttttgtataatgtatttgattttgtaaatacgtatttcctgatgtgatttttgtgagaaacgctaaatcttttagtataccatgtcctctcaagattggcaggagctaaatactagtttgtgggcgatttgtattgtgtactgtacaataactggggaacttttataattataaaaatatatattaacttttagtgtgttgtttaaacaaatgactggaacatactaaagatattagtaggattttttctgaatatttcagacttgaactcaggctagctttcttgtgtttttcaaaacaaaatggtgtcttgtcttttaaaaatcaataaatttgtttccttgttacaaacatttgaaatgacttgtttttcccccccaaccccatcactgtctgggagcttatgtcacaccacctcctccagagaggactctgtgtcattcatcagcttagaaacaaaattaagttgttttccttctttgtgtcaaatgaaattggcaatatttacacatgaacagcacaaaaagagaaaacaaaattataggcccagcagggtacaaatcttaccctcaaagaaaattagtgattgactgctgtttgatttcagaaactgtcagcatttccattgtacatccagatttccgggtgttcagaatgtgtttgttttatgtcatttcacattgatatttggcatccaagttccttgcttaaattgaaatagcttattaaacttcactttaatgtccttaagaagataccccgcccatattttttttttggttatgtacagaaaaatttttgggatctacatttatgggagtgatgaaagaaaatgatcatgtagtcactaccacaagaaaggttaaaaattacttttttttgtttacctttctgacagttttctgatcatagtatctaaaatggggaatagccaactttgaggatttccttaagagagaaataaaaagcagagaatacaatttggggaatctctagcatggtacttgatatcaatggtagtcaatagtaaaattttgacatcttagttcatagcatatcaagatgacgacaactactactactctgtgtgtgtgtgtgtctgtctctctctctctctctctctctctctctctctctctctctctctctctctctctctctctctctctctctctctctctctctctctctctctctctctctctctctctctctctctctctcttcctctttccctcccccatgtgtgtgtctatgcatgtgtatatacatgactgtgggttcatgtacataccagagcacacacatggaggtcagagaacaacttcagctgtcagtcctaacattccactttgtctgaggcagggtctcttgtttgccaccatgcatgcccagctaactggccagcaagcttgagaggcttctgctcccatctggtcattaaccagtttccctttgagtggacagaaagatcttatgtcatgaggctgcccggtgccccctgaaaagcactaccatatcaggatcttcacattcatttttctcgttagcaagttggccctccccagctcagtggcagcatctgccatggagtttcagtgagacaagcctgtgctgtggagctcctgctgtatctcattcatgctgctatggccccttcatatagagaatattgcaaaagtaccctgataagtgaggcggtcattaccctgatgcctctgttagattataagtctgtcctgcagtggataccttctgggctgggcattgacataacataaaagtacattcatactcactgtccctctgagaagtcccattacacatgtttcgcaccagacccgcttgttaccagtctttcaatcttgttttgctcaaacccctgtctgtttagtcactagccacttattcacagttttgcctggaaatcaggccggcattcaatgtaagaatgaaaaagagacaaatcataaacccctgaccacttggcgcgcggggggtgggggggatggataaacccttacagcactcttctgtagatgcacagattatgtgtctggttagatctctcactacactcttcccagaccactactgagtcagggctataaagcaacatgagcagatgcatggcagctgagcctagtctcaattactgacccaaagactagtgaatgagatacaagtcatttctacttagtttctggattcgggggcagatgtgggtatgagccacacctcagactccacgttacctggatgaggctgggcagcacttgctaggtatgtagcagatgcctctcacgtgggtactgcgcttgacctgtttgtatgcttatcttgtaatttccaggtagaaacatcactagattggagcctggtcagcttacccagggtcatatttacccatgatcaagtaagttgcaccaataacatccatccttgatcttaatttctttttaatatcctcaaaagaactcccaatggcaacacagaatttatcttctcattcactcatttttaaatttccaggaggtaaaattatttcctctagatgcacagatgctcttgagatttttttttctttatgtattcaaaaaatagccattgactctccaagagttccttttaaaacttgcagatattccaacatttggggagtgtctccatttctttctgcaggctatttttagagccggctcatctgtctttgcagttgtcttgcctctacactcagattgtctgcacctcgcaaaacacactgctttgttagcagttccctattacaaggctccgggccatgggactgtgcgatgagcttctgcagtactagacagagaataggggacagttatttatgttagggttttttttttaaatttgttatcagaaaattttaaatacccatatcagaagatctcatagtaaatgtacctctgtaaaatgtggatttctgatttttgttgaaaattcagatagtctgacaatactgacctcatggaactggagcagctgggtttgtatcctcactgcctctatacacttgctgatattaattgctactttttctttactctggcacctgcctggccctttgggcatggaggttttggctggttcttcacattctgtggatgttggcacattctgtgggtgatttgtcgtttgttcagccaaggactgaagagtggtcctcactatgggaaagcaggaatgtaatctccttgatgcctgtcgtggtggcaggtaatgtcagggcatccgcagtggctgatgtggaatgagagagaggccatgctgttgttttaagctgcacagttaagggaagctccagctctccccttgggtgcttaggcactggtatccaccagcagcacaagcaggtgaaaagtagtcttttctgttgataagcatctgttgggtgggagaatacaatccttcccccagacacctaagtttcagtctgaagtatttgaaatcagtgtctttcaatacttcatttcagtcctaggattttcctgtctaaaggtaggaatatgggaccattcaaaggaatcagtctcccatacctaatatccctccccctgcataaggacaacctcctgaggggagcagcctgaagggatttcgttagatgagtctattatttctctaggtgttcaaattccatgtggcccagctagctgtaaaccactggagtggttcacagagagtcactggttgtttaacttagggtttttcacaagtctggcaatcacttctgatagttggttcttctcatacatgtgataaagtgaaaggagatgggtaccttgttaatgccttactgcctgctgcttcattcaaggataaaagcaggtgtcagtatcatataagacagaattagaaattttctcacaaaaacaaaggtcttaaagagaaggctactggcgtgggagtgggcaactttttctttcctttttttttttttcaaattgagtcttttcacacaaggtctgaagaatctaggagaaaatatttcagaaacactaccaagggggcagtgtctttctgttcttcctaagacctatagagatgtaagcatatttgatgtcttagaaatggggctgccattcaaaggcctccttttatactccatgtaatgaaacgggaggttgaatgttgatgaaaaacattgacaaagttaagggaaagatttggattgatgtctacagagtcacaagcagatttccaaggagactttcagaaaagagttcatcatgagaatgatgtctaagagatcaaggcagaagaattttagtgccctactctctgttcattctgatagtgctccggggaggaaagggttaacagctggtccctttgcttaactgtcagtgatacccacatagatagaaatgacaaccatattacttatcatacaccaaatactgattgaagaatattccagagactgttgtatttagctgcacaactgttttgtatataacttgcaacccattaagatttctcacactacagaggagacttggatggtagacagtatttaggttggaagactcctagcacagtagctgtctatgctgataaaaccaggtttgcatcagctgattgccagccctaagagtagaaagcatcccaggcttgatggagacatgggaagctgtgtctgtgttgtctcttcagagatgagaatccattatactctccagataaaaggcaaagctagttaatggaaaaacttaaaaaaaaaaaaaaacactgtgtccaagtaaaacaaaaagttcagaaaagcaaaaagagaaaatatagggagtgaaaatgtttaagtacaaggtatgaaacattaatagtaaatcgtgcaagcaatgctcaaggtatgaaaacattgagaaaaatatagttagataaacctcaaatattatgtatgaaaaattaaactgatagattttacctcaaaataagttcttggggccaaagagatagctcagtggttaagagcactgagtgttcttccagaggacctgggttaaattcctagcacctaaatggcaattcacaactatctataactctagtcctagggtcctagcccaatgccaccgcctgacttctgaaagcaccgtgcacctggggggtaaacagacaaacatgtaagtccatatacataaaataaataaacttaattttttctcttgaaagacactaagagactgctgtatttgctaagagatttttcaccatgcaacttgtgtgaaatttatccatactgtaaacagcacttctcaacctgtgggtcccctacccctttggcaaacctctagctccaaaaatatttacattacaattcataacagtaacaaaatgacagctgtgaagtagcaacaaaaataattgcatggttggggtcaccacaacacaaggagctgtattaaagggtggcagcgttgggaaggtgagaaccactgctgtagagttagattccattaaatggtaaacacggtgtttaggctaaagtgctctccacaccctcgctttcccatgcagatgaaccctgttttgtatcagcttattgccacattattcttgaaaaatcttttttaatatatttatgcagcataaagctagaagatagagataatggttctctctagggcagaaggcacttgatccacaataatgtccccacggggagattttaagtggggctaggggagtggaaagtgtaggttggccaaaactaaggctatataaaaaggccttatgggaatgcactagtttgtaagctaattttaaaacatgctatacaaaaaaagacatctggatataagtaccctgcatgtgtgggcaattctgctcccagaagatattagatattaaatgaaaatctcagcactaggtacaggatagctcactatcagttattggtcagagaggcaccagaaaacacaggctattgccactccatttttacatgattgaggtttcctaatctttacatttctcatctatgacatttaacacagccagcataggaagctcctgcttgggcttccatacttcctgggtctttggcatgggggatgggagccacaaccctgtggagacagacatgaatataaatcttctgccattgctgtatattacagttcctttctgtaacctaaaaacctctagtctcccacccatggcaggctcacagtttctcacacagcaagaaaatacttacaaatacacacatgtgccatgtcatgtttgaaccacaaatatgatttttctgcagattatattgtccagaagtgcagtagacactgtctttgtgttgttgacttcttgctattgtcacaaggatgaaataacctataggcaaattccatagaattctaatgattttaggttagaatttaaggtaatggctttgtttcatcatgacattctcataaatataagtcattataatgtatttttattcattcttctctctagttccctcctctacattctctctcccttatggctgccttcacagtactccctaatgattgtctgaatttcattaaaacctgtagtaaacaccccccttcacctctaattttattaatttgtgtcttccctttcttttggtttatttggctagggggttgccatctttttttttttttgtctttcttttgttaaagaatcaactctttggtatattgtatgtattttttattttctagttcattaatttctactctcacctttattatctcttactcttcatggcttctgagctagggattgttatcctaggaccttgaagtgtatcattacactatttgtttgagatgtttctgtctttttagatggaagtatccacatttataaactttcttctgaaagtttccctagctgtgtctcaagggttctagtaagttatgctttatttcttttaaaacataatttgtttttgctcaatctaatatttcatacatttatgcaatgtattttaatcacattcatccaacactacaacctctaactcctcctattggccccattccacctccttcccaacttcatgtcttccttcttgtagttgttgctattaataacctcctgagttcaatcagtgatgcccatctgtgcatgggtgtggaccatctactgggacataggcagctactagtgaacacccccccaagagagtggctcttcctccctccgcagccaacagctgccagtggctctttcaccaatagtgagaccctcccacttccatggaatcctgactggcgtgatcttgtgcatgtcttatgcagataagtatggctgctgtaagttgatatttgcaacagctgcatcatgcccacatatcagtatttcacagctctcctccccatctgtcagttcttatattctctctgccctcttgtcttaattggggtttctattgctgtgaagagacgccatgaccatggcaactaaatataaggaaaacatttaattgggtggctcgcttacagagtcagaggttcagtccattatcagcgttgcagggaacacatggtgctgatgaagaaactgagaattctacatcttacaggcaacagaaacagtctcagtggctgagggaaacttgagcaaaaaagacctgaaagcccaacccacagtggcacactttctccaacaaggccatacacattccaacaaagccacacttcccaatactgccactccctttgggggacaaattctttcaaactaccacacccctattctgagatgttccctgagccttggatggagaggcttaatatagatgattcatctactgccaagcactcagcattatttatactctactttgaccacgtatgaggctctgcatgaaccaccacccactgtaaaaagaagcttctcagacaaatgttaaaaggaataaaaatctgcaattataaacataaatatttagaagacaacttggctgcatctatcaaagcaacaacagtaggtgtcacccaccaccaccaccaccactacatagggcctatgttctcctctgtcatgagcttttgacaagatttatgatataagggatgtaatccttcttgtgtttcaggcttcagttcctagcagaaagcagttggttgcctctataaccaccataccattatgcttttgccaggcaagccagaattgtagcttgggatcagtttgggtgtttcttcccagaagcctgcacagcaccttctggctttatgtaagatagtcatcagggagatagtttgcttatcagttgaggcttatttctgcaagtccttcatccaaaatgaatagtatctgcagcactatcatcttaccatctagttatggtaagcaaccaagagagctggcaatagcctgttataattagggttcttctacccatgttctattcaaaccctttaaaatattttaatttaaaatatttactatatttaattatcttacaaactagtagcttcttcagatatcctgagttttgtctaattcatctcctctttcctcccctcctctgattcccctagccctacttaaatctttaacccctagaactcccccctcctttcatgttgcctatattctaccagccctctaattaaaatggtatattacttagatttctattgctatgattaaaatatcaggaccataagcagcttgacagggtttctctgttttgctttggaggttgtcctggaactctctctgtagaccaggctggccttgaactcacagagatctgcctgcctctgcctcctgagtgtgtaccacctatgcccagcttctatgttttttgtttttgttttttaaatctggtcttttgtaggcttccttttctttcttctgtgtatgactaaagcttttctctcttgattagctttgcctgtcaaccaaacagagcctaggaccatctgacagaggaattgcctgcattagattggctggtcatgtctgtgggagattgtcttgattgttgattgatgtaggaagactcatcccactatgggaagcagcatccctaagcaggtggtcttgggctatataaggaagctagctaagtatgaggctgttatcaacattccatcattaattctgcttcaagttcctcaagttcttgccctctgttacctggtagcataagccaagtaaattcttttccacctctaagttgcttttaatcaaactgtttcatcacagcaacaaaaaagaaacttgaacagcttttctatctccctctttgaagtagagtccttttttcttattctgactgtctctgtgcacatggaacgccctttagtttgccattttaatgggaaatctggaagcctggagatatttatttatttgtttatttatttatttatttatagtttggtacagggcctctctatgtatccccagctggccttaaactcactatgtagaccaggctggtttcaaattctgtctgcctctgcctcgtgagtgctggaattaaagtcatgtgtctccatatcccagccttgggatatttattcttaaaggaggataaactcaggatgaagccaagtcaactttagtgaggtgtgtatttggcttggtcacccaccacctccagaatcaggagagtttttctctgagagaatgaaaaccatgactaaaactagtctgatattgcacatacaaggcggagagactgtattgaaggatgagataaagtgttttatgagtgctgacttcctagtagttgttgtaaaagcctcacatattaacttatttgattatctaatgaccttatggaatcatttttatgtgaattcctgtttggagagaagctaaacatgtcaagtgctgttttaactgtattatgggcactgcagagtgcctgagatagacggagtgatggcaaaaacttgagaatgttggcattctggaaatagttatccaaaggtcattcttggtgccatatgctcctgtgaggttgtcattgctagtttatctgtgccaaggacaaagaacattgctgtgggaagcaagtgttcctgaatgatcttgtgggcatgctcactggtacaactaactggtagtatagtattggaagaaaggtctgttttcccagcccaatagcccatcttctatttctgttatcccacctggggctgtgtgatttttaaaacatggtgtgtgtgtgtgtgtgtgtgtgtgtgtgtgtgtgtgtgtgtgtgtgatgacttgtacatatatgtgaatcagggtacacagatgccaaggtggaggtcagaagacaacttttagaagtcagttctttccttcttccatgggttctggggatcaaacttgggtttgctggctttcacagcaaacgcttttaccaccacacctcaaagtactttgtaagttcagtcttgtcatttctaaaaacaaaataatagcaagacacacaattaaagggtggtttgaaaatcagctgaggtgacccctgcacttaacaaaacacacacaacaacagcagcaacaacagaaaacttggacagacactgctatggttgcacttacatgatctgtctcccccctcaacacacacacacacacacacacacacacacacacacacacaaagcctttgcctttccctgacttggctcccacctttacagtgatgaagaaagggattaccccttcctgcaaccacatttttgcatgatcctaggcaagatctggacctgtctcgccttttctccagccagggctttgacctatttttcttttggcacatcctctgtttttgggagtctatacttctctgacttctgtcttaaatgtaaacgttcatcacaaacaagcaggatttgtggcaggattcatcttcgtttagaactttctaggatgaccacatcttatcagagcctttaaaaacctctctcttacaatcagcctgaatgacacactttctgtctctctgtctctctgtctctctgtctctctgtctctctgtctctctctctgtctctctctctctgtctctctctctctctctctctctctctctctctctctctctctctctctctctctctctctctccttttgcctggtacctcacgttttcccaggctgaaggggtaaacaggtcttggacagagaagagaaacaacactgattttgaaagtcagatggaaactattagagattatcacttctgagcccgggatgtgaggccacaggccaactgcacaggtgcatcaatgaatagaagccaaggactgtgcccaggacagctcccttatgagcgtggcggctgcagccaggaacacttgctctcaagaaagaacaggtggtcgaaaggctgagcagaacctagcttagtctttatttgggaagtcagcttgaaaaccagtcctgcacagagtccttctgcaggtatttgggactagctgacacaatggagaaagcattctccctcaacccccaaaacaaaataaataataaaagaagaaagagtatggggagggaaattgcatgattttacataatcatttgcacatcccttcattccctcataagcattaaatacgaagagccatccatggatgctcagaatgccctgatgtacagaatgcatatcttgtcttatccaggtacacatttctctctttccatgtctgtgtgtctataaactgcagacaagcaggactgcccattattcttagtgtaattcacaagttaactctcagccaatgatagaaaatggaaacaaaatggacagtctcttttctaagtcatatccagggtaaaacaacaacaacaacatgaaattagagccttgcatttctataagagtgccgtggcattatgttccatgtgctgcccagtcagcctacatacagaaccttgtgagctatagaagacttcttcactagattcagtatggtgaatggatgatgaaaagagctgattgctaagcacctcattgttagataccatcctttgttttagtgaccctaagtcctggagagacaccattcttaagtggactgtcttccttgcttgttagactacaaatgctggctttatatttagtgttgagatctctgtaaatatggtcagacacagcctatttccccttcttaatctccatggcttgagaggagcatttaacccaaaacttttagttcatttcaccctcctctccctctctaccttggaacagtgctgtagagctgtgtagtttagctgccccatctgtcctccaaaataatgcataatttagtcccgatataaaatactacacacacatacactcacacacacacacacacatgcacacacatgcatgcacacgcacacacacctcatatataccatacacactacacacatacacatataccacacaccatgcacacacactacatatatacacctcacacaccacaaaccacacacacacacacacacacacacacacacgcacatcatacatatataccacacacacactacatcaatacacacatacacacacatgcatgtaccactgtagatggaagtttctgtcccacccggacccacagctctttagtcccaaataaataaacagaggcttatattaattataagctgtttggccaacagctcaggccttttgttggctagctctttcttatttgataattcatttttattaatctatgtatctccatgtggtcttggctttccagagaatgttcggcatcctatcttcccagtaaccacatggcatctccctagagactcaccctctgtgttcctctttacagaattctcctagtctggtaggcccacttgttcttcctgcctgcctggctacattctgcttgtccattggacaaaacagctttatttatcaaccaataagagaaacatatatttacagcatgcagaaggacatgccccaacataccacacacacacacacacacacacacacacacacacacacacacacacacatatacaccacacacacaccacacatacacaaataaagcacagaccacagaccatacaatacacacacaaatcacaccacacaaacacacatacaacacttcctgtacacatacatacaccataacacacacacacacacacacacacacacacacacacacacacaatgccactgctttcttacacacctataattgtttagatgttgcccagaaccccttctgcctgttgtgactaatggttcctacagggatcattgcccagcctaaaggaaatccgtttgaatttttgctaatgggaaaaaatgctatgttctaaatcacttttaaattgcagcttatgcaaaacactgtgtgttcactgtgaaggtccaagaaatatgggcaacctagatgaagagcagcattagtggaggatgctaccattgagagacagcaatgaaagacttctctgtgttctctctaccttgtgaacacagacatgcatacacaccgagtgctggacaccacttgctcctggctgctttgcatgtgattgtaggtctctgttgtctttatatcaatgaggacatattttagagggcttcttgcctacatttttcacttaatacttctacttgtctattttctcctactctttagtattcttccacaaatatcactgttaaaaaattcagcattagtgtaggaagtctgagttagtaggtaataagtgaaccaatatttgttctgtgattagtagctaaattccacacatgtgcatgaatcttttatgtgaatttaaaacgggattttttttattttgtttctttttttctacataggtctttaaattttttccattttaaaatttaaatagaaaccagcagcttcttttacatgtcaatcgcagttccctctcccacccctcctcccctgccccccactgaccccctatcccatcccctttctgctccccagggagggtgaggccttccatgggagatcttcaaagtctgtcatatcttttggagcagggcctagtccctcccccgtgtgtttaggctgagagagtatccctctatgtggattgggctcccaactccatttgtgtactaggaataaatgctgatccactaccggaggccccaaagattgcccagacctccaaactgacctcctggttcaggaagtctggaacagtcctatgctggtttcccaactatcagtctggagaccatgagctcccccttgttcaggtcagatgtttctgtgggtttctccaccctggtcttgacacctttgctcatcactcctccctctctgcaattggattccagagttcagttcagtgtttagctgtgggtatctgtttctgctcctgtcagctactggatgaaggctctaggatggcatataaggtaatcatcaatctcattattggagaagggcttttaaggtaacgtctccactgttgcttagattgttagttggggtcaaccttgtagatctctggatgtcttcctggaagcaacctagatgcccctcaactgaagaatggatggagaaaatgtggtacatttacacaatggagtactactcagaggaaaagaacaatggaatcttgaaattcgcaggcaaatggatagaactagaagaaaccatcctgagtgaggtaacccagtcacaaaaatacaaaaatggtatgtactcactcatatatggattttagacctagagcataggagtagcagcctacaatccataccactagagaagctagggaacaaggaggaccctaagagagacagacatacatggtctcccagagaaggagaaagggacaagttctcctgagctaattgggggcatggagggaggggagaaggagttagaagagaaggggagaagagaagggggagaggacaacaggagagatcaggaagatccagtcaggagaagaatagaagagagcaagaaaagagatattataatagagggagccattataggtttaaaaatgattttgatttttgagacagggtttcttcgtgtagctctggctgccctggaactcaatctgcagaccaagctggccccaaactcagagatccacctgcttctgcctctcgagtgttgggattaaaggcgtgagacatcaacactcagcaaagatatattttttgatttttttgagacaggatttctctgtgtagttttgtagaccaggctggcctcgaactctcagagatctgtctgcttctgccttctgaatgcatgtgccacaacagcctagctagcgcaaaaatatttttaattgaaatagaatcctttctccagcccctccaagctatactcccacaaacccctcccatgtcatcctaacaactctccagttcatagcctttttcttttattactattcttacacacacacacacacacacacacacacacacacacacacacgtgtgtgtgtgtgtgcatgcatcttacatatacacataaattttatatatatatatatatatatatatatatatatatatatatcctgctgattacatttttgttgttcatggtttcaggttgactattctacattggacaataatcggtctcatccctggagaactaattttctttcttccagcagtaattagttccctgtagttcattgtctaggtgtactacccatgaaatttctccccctctatgttacctcattcactgaatcttttaaaatccaagaaccagcctggagacacacctgcaatctaactgcctgagcctgagggttcaaaccttgagtttgaagccaggcagggctatttagtgagttacagggtagcctggtctacagagtgagacctttgtcaagacaaaacaaaacaaaacctaaacatttatattaaaagaaaatcatataaggactacacatagagaccctgagacactggtccctaatagcttggactaggacatgacatgttttcttccctgcccacatgtacacagctcttaagatgtcccctctctgcctgctgcttcagttatcccatggtcctttttatgccctaatctgtcaagcacctatttgtttatgctgcttgtttccccctctaccctggaaactgccatgggacaggctgtgagacatttttaaaatggctttagggaatggagaacaatgtaggactcacagtagggccgcatctggtagctggtaaattagcaagtgagtctgtacacagatctctcaggaagctgaggcaaaaggatctcttgagcccaggagttcaaagccagcctgagtgaaataaccttacccttctcaaagagcacaagaaactctctttctctattcacaagaactcagaaatgccaaatggggtcatagcaagggcataccattgacaagccatggagagaaccagaattatatctagaaacataattactggtaatacatttgtgtgtcttttatcaaaatgtcataaactcatggtatcctctccagagtgcatgggagaaaataacccaattatcagtcttctctcacagccatcataaaagtgttttggactttaacacaacagcaacttatgtttcctcaccttcagcattgatggttgtcatggaattgaattgcagaactgggaaaaggccctgagtctgatgtagaaactgaagatcagagaaaatcaatagtctcccaagaatatgaagaaaattggtgaacaagttggggccacactgaacctcattttacaggtaaggaaactgaagcttgattagtgcttctttctctttttaggttctagcatgcccaggtaattattgtgtggtgtcagaaggggctgctcttggcttagtcacagcatgcatggcaccctagcaccctggaatatgtacttctgaaactggctcaaagtagacagcatccatgagacacctcacaggagccacagctgttccttgcattgagctggggctgagcccttggacttccatgccagaggaccctactcagcatctggccacttccaagcagggaccagactgtgttccactttgcagctgagcctggttggaatagtcaactgtcaggaaaactccctgaatccagagaaaggcattagaacattgacacttctctgagaagtcagtacaaataaggctgtggaaaagatacccactattgcggctgatgctgtccttccctgattcctaactccttctgtgttcattaaatgatgtcataaatttggttcaaaatgactaatgtccttattagaagagaggcgcccaagttgggaacaggcacaaccctctcaggaagcagaggcgggggggggggatggtttgagtccaggagttcaaagccactctggtcaatttaaccttcccctgtctcagagagagcaagagagctcacattatttatgttcaggtgcccaggaaatgtcaaggagggtcacagcaacaggataccatggtggaccatcaagagagctcttaacagaaaccaaatgggctaggacatttaccccggacttgtagtctcagaagctgtgagagaatggccctcttgtttcaatcatctgctccatggctattggttataatacatctatcattcaggttaaaactgtatttgtcagaagtaaactttgcctaactggagcaactgagctaaagctactacagaattctaggtgcttacctcctgagtctgtagcatctctatccagatgtggaggtaacttttgtggctaaaacaaaagcatgaatgactgtagatatttttttatcaccaaagggccagacctgataatatttacaaactagaaagtctttcttcccaaagtaaccagaatccctttcagaagccacactcaaatggcaggctcctccctggcatgaggaaaagtgacaataaaaatcttcagtaactgggcccatgcagagagcaagcattctaaggtaaccacacagccactatttttgtgagtgtgactagccggctgcccaacactgggcaaaggctatacaaaaaggaacacccttgtaatcagtaggaagctaccaaaggatggttaatgttcacaataatgaaatgtcactgatttttaaaatgaatttcaatatcgtatctgcagatgagcagaagttgggtgtgaagtatatatacaaaatgttaacaaggattgcacgtatttgcacagactgtgatgtttcttcgctttgttctgttttatgtatcatccccttctccacagtgcctatgcagtacaatcatttaaagtcaaacaaaaactgaataaatccaccttcttaatccaacctacctacacccaacagaaaaacccagctcctcccatcaagctttgttcttccagcacctttggcagtctgaccagggggcttacacattgtcaatattgtgtttcaccaaggtttgtgtctatttcatcctctgccagatccctattcaatcagccccagaaatttcagtcattcaaacaagactttattcctgccccattgtattttgagttaatgagttttctcaatgtggtaataattgctccgcaacttgcttctcagttgcacacacaaggctgtgaagagttgagaggaggtggtatctggaagccttgaggcattgattcaggagttggtgacagacacacttgtgactgtgtcagctgcactaataggctgtttggggaaaacagactacaagtttgtgaagactgtataaatgtggagcattcagaagtgtgagaccccctgcaggtgtggacaagacctggcatggaaagccctgagtacagagatttctgagtgggacaattctgccaaggttagcaagggcaatgggagaaaatgagagaagagggatttggcctgatggtgtgaggtgacgtgataaaggctcttttcggtgtgtgcacagcagtgttctagttttcgttgttgtgagaaagactatgatctaatgcaacttggggaggagagggtttatttggcatatgcatcctgggccatagtccattcctgacagatgtcaggctaggaactcaaggcaggaacttcaaagcaggaactgaagcagagatcttgatgaatgctgcttactggcttgttcagcctgctcttttatagaacccaggaccacctgctcaggggtagcactgcccacagtgggctgtcccctacatcaatcattaatcaagactaagctcccctaccccagagacttgcctacagaccaatctgatggagacatcatctcaagtgaagttttttcttcctgggtgaccagcttttgtcacattgacaaaaacattaaccaatgcaagcaggatatctacctaaaaaatcatataaaggaggcagtttagtgagtaatgggggaaggattggatttggagtccaaggtatgtgtttctattattgccttgtatgtgtggtttatgggcaggggcatatatatttgcattgtgcacatgtatgcgcatgtgtgggaatgtcaaaagttcatgtggtatcttcttctgtagctcccacatcatcatcatcgttattattattattattatttgaaatgggattttccactgaatctagagcttaccagtttggcaagactcactggccagcagagcccaaggatctgcctgtctctagccctccccaaagctggtgtgccaggcatgggctgctgatggggaatgtacttctttgtatgtttatcttattgattattaaataaaatactgtttggccaatgagacaggaagttagtcaggactagaagtcaaagaggattctgggaaatgaagtagagaagtgatgacccagacaggaaatgacatagcaaggagactcatatttaagcggaggagaaacaggaagggtccctttttcctgtttgcctcctccagcggcaggatgtgagccaccggcaaggagggacgccaataaggcatccaataagataagtcttataaaatatatagctgtatgataattgagactgagctaaccgatgagaatcctagtcatcggccaagcagctttgaacctaatacaagtttctgtgtattcatttgggcctaactcgggcaggcagctggcataaagcacacacgtggggctcaggcagctttcggcagaaatatttatcgtaacaggctgtcatgcccagcttctttacatgggctctggggattggaacttggttttcatgctcccatggtaaacacattaccaacggagccacatccccagccagatctctgtctttatgaatattgaccttctattgccttctggcttattgctgcccctgtatgagccttagtttctctctctagaaagacaggacacagctctctgacagtcgtgaacatcagattaggtaacccgtattcatatctggaacctgtggcccctaaggagatacccaggagtttgtatgtttcagtgcaggtgcatcccacctttgccccagatgagtgtcagacctgcttccatttaaggtgaggctcatccccctaatttgtccctgatccataatgacagacaactgtgtctgtgggactccctccaaggtggctcaagctcatgtgactttgggttttaaagcttcccatgggattcagacatggtttgatctataaggacagcagtgaggatatagtaaggttagacatgcactagaagtttttgtgtgctattgcagtgtaggatgagtttgtgactgaatggtcaggagagaagatattttaaacagttatcagactattggattgaaatgagtgccaggaattcctggctctgactctgggcagacatttcacacacggctcacagggctacaatgaacacatacctgattcctggctttggcttcatcttttctctggaattataacactgctgctgaaggaatgaaggagacaaaactagaaacctttcccttcctgcttcgccaaactgtgaatcaatttattttccttcatcagtctgtctaactgaagaggctatgggcttataaacctacgtcatccctgttaacagcctctggttatgaaactaccgggcaaatttaaacatcccagaagaaaggatttggaatgttttcactataaagaagatgaatgtttgatgagacagatgtgttgaacacagatatgccatgctttaaacacaacacaatatatgcatatatcaaaacatcatatcaccacaaatacatagactttttaaagttttatgtatcagttatttttaaaaggggaggtcctctacactccacattcaaagtctcccaggtcctcttgaaatggagtagaagtgggctactaacctctcatccactaaataaagacttccagaatagttaatacaatttgctgtgaagactgactacataaaaaaaaaatctctcttatccagagataggtcaaataagaataacaatgcttaagacccaggtgtctttcagtatggccctttcctttcccagacataagcctgtcattttctgagaacctcacaaacaagactatacattccctgttttgtaaaatgagtcttgactgccttttgtaacccttgtggcctatggtttcaacttcttgagatgtaatcctacacagtctccccagtgcctctgaggaaccacccaattatttcatttctggaagaaagagaaagaaaggcaggaagaaagaaagagagagaaaaaaagagagagggagggaggaaaaaagagagaaaagaaagaaagagaagaaaagaaaaggaaggaaggaaggaaggaagaaagaaagaaagaaagaaagaaagaaagaaagaaagagttccttagaatcatttctggaaaacatcaaaatcatatatatggctgctgctaaggctcttgagcatgacattctcttgagaaatcctcagccaagcttaggtgtgtttcctaatctccttttattaattcctgtactgcgatctctgctaagaccttttcttaataaactccaacttgcttcccacccgttcattctgaaattcttccctgctgtgaagtcaagattcctagcttcaacggagtggagacccctgaagagaagtccttaggctgttatgttcacagcatggagcaggatctccagcccctccttccccctgcttctttaaaggtactgacatattctcttgctgtccccacatcatccttctagagagttctaggcacagacaggagctgggttttggtgcatgcctctctctccgtgtgtgtgtgtgtgtgtgtgtgtgtgtgtgtgtgtgtgtgtgtgtgttctttttttaggcctcctggaactcactatggacttggggattactgtgaacttctgaccctcctattatcatttctgatgactggaattagagcatgcaccaccacaccactatgcccagtttatgccatactgaggctcaaacccagggctttcttcatgccaggcaagtacgctctccccagcactattctttacattcctttactcaccactatgccatgagtattgttcttgttagccatgctgtaaagctcctctattttggctgaactatgaaaatccctgtagctacagtcattccttttccagaatgaaagtttcttctctagattcttggctgccctggtccatggaaccgcagtgatggacaaacagcaaaggcaatgtttatgaattcacctgatagtctttaactggatactgcttaccccagcaatgatcactgccagccccaaaagtattcttcggctccttacccttttctgcccatctaactaccccagcttgtagtagggtggtgggttcttattcttacatatccctacctcttgaaggtttccttcccaaattaagaaggccagggctcttgacaagtcagtccttccgtgccccaacctgtctttccttctcattggttgatttttctcattgattaattttagatctatagaagcacatttcttccccctcttggtgtgtgtgtgtgtgtgtgtgtgtgtgtggtatgtatgtatgtgtgtgtgtgatttgtgtgtatgtgtatgatgtgtgtatgtgtgtgttgtgtgtgtattgtgttttgtgtgtgtatgtgtgttggggtaccaatttccttggaactgaaacgttccctcatagaaagaaggcccatgagactcagaaagtaaacaacctaacaaagtcctgaagaattaaaacagaactcacatggcgcctctccagggttatagaagcagtgaacaactgctgaggaccaaatgagctgcccaggggagactcttttatctgtctagctgcctgtaaatcctgtagagttccaaggaagaagcttcatgaactgtcacccagatcagggtggactttgtggtgacacagctgtctttgagtcacccttgctcctgtatgtaacccctcaccatagtcccctaagtagcccgatggaaacactggttcaccaacctcgacattggtaggatcattaccttggtatggagatggtggttcactctctggggtgaatagacatttacttgtttctcctcaagaaaagtctcacactatagtgtgtgtgtgtgtgtgtgtgtgtgtgtgtgtgtgtgtgtgtgtgtggacacatgtgcttgcaggtgtgcattcctgtgagcaatgtgcagaggtcagaggagaatgttaggtacctagctctatcacactccaccacattccttcaaatacagggtctctcactgcacctggagctaggctagtggccagcaagccacactggtctttctttctctgtcccctataatactgggattgtaggcatgtgtgtgttcacattcaacttttatatgggtgcttaattctccactcacgtccttatgcttgcacagcaagctcttattcactgagccatctcttcaggccatttccctccttctccacagttacattatactccatggtacagatggagtaaatatgatgaacttgcttaagctgtctttaatctctttaggagtgaataccttgtctttgcttgccttcatttgtttttaccaagttgtagcaaaagacatctgagtcagtactgatgaatcatggatcaccatgagtttgagaccagcctgggctacttagggaattctaggcatacctgggcaacagtgtgagaccttgtcttaaaacacacacacacacacacacacacacacacacacacacacacacagagagagagagagagagagagagagagagagagagagagagagagagagagaatggagaatgatagtggtggtgatttgaacatggagacatggagacaaggtgacatttgcctataatcctaaaactcaggaaactaaggagaatctcaagtttggggtcagcctcaagacgctgccacaaacaagcaaataagcaaacaatttgagctcaagaaataagaataaaattcttttcaaaatttgggaaaagatagattgttttgcagtcatgaaatcaaggagccatcagaactatttccatgcagcataatatctgaataataattaaagaactccatacactaagagatcaacacagaacatgcagattggtggatgacagtgtttccctcctgaagtcaaccactgaggtaccctcgctccattaaacttgcctctaggtcccttcagtgatggtaacagcacttctgataacatgccagccgacctagaggctttctgaacagccaatgagatcagcagcctgtttcagaagaataggctctgtaaccacagatgcccccttcactgaaataacagaccaaccttgtctttattctagtctcattctttgatgccagaagcactgtaaaaccatactctgagtcctgcttgtgcacattcatctatttcttatctgtgggttccagtctcactgtctggggatattggtctctggggtggactgaagggacttgatgataatgctttactttcatttaatttgcaccttaacttccggccttctcactggggtccatctgtagtctcttatcaaagggacttctgggttaaaaaaaaaaaagatgtgaatgttctgaaatttggttgctgatccactgaagtgatttattagttttctttccataaatggtgattgtgaaggtcactcttcaatcagtcctaactaatgcagtgtagaaaatgtgattctaaaatgaaaaacaaattctttgcttttgtttcatattttggaaactaaatacacctgagcatctgatattttcttatttttagttacatgtgtgcatgcatgtgtatgtgtgtaggtatatgccctatgagccagaggcataggagccctggagctggaataacaagcagttgtaagtcatgtgggtgatgggaaccaaactcaggtcctctgcaagagcagtgtgctcttagccactgagccacctctccagaccctgcacatctgaccttatatttccttctggtgtgtgaacagatgacatttatcctgtggaaaatcaccttccaggatgctgctttctctcaattatggcaatgaagactaaaaatatagcccttatccaaactttacattgtaattgatctaccaataaatgtgttatttggcattgactacttgtcatttataaatgtgctaattgtcatttcaatttttcagaatacaagttccgtgttatttgagaaaagctctagattgttttgctgtggaggaggaatgcttggatgtactacagcggagaagcctctctgcctcgactcctgttaagcccacgtaaggcaaagtgcttttctatttttaaagagcagaggttgtagctgctctggagagagcccctcttagcaggtacctcaggaagataattggcaggtgctcctgaaggttgatgctaagcacagagcatcacttgctctaaaagacctcaggaggcccagacttggcatacctgcagggattttactgcataagtgaccatttgggccatttttactgagggtccctggttgtgtttcttccttgttacagaaggaacaaaaatatcatcaacaaaaaaaaaatgtgtggttcttaatatcactgggtacttttaaaatttgctattaccatgtcttactgaatttaacctaattatgcttgttttcgaactagaaactgactttaaatgaagacaatagtctaggccactttgtctgttattatttctctgttttattgttgttgtttgttactatccccctttataaggtggggatacttaaggcctacaaaggttggaaggtattgtaaaacaagagggaaaaaaggctctacttgtagtctcttagcattataataactgaaattgatgtgcaatttagtctatcctaggaaccctcctctcaatagtgatgaatggaacagttacacagcatgagcagacaatgctgctcccagaaaacatggttattaaataaaaaccttaatggcaaacccaggcttctctcctagaagttattgtttagggaggtcccagagacacccccaaagaagatagactgttgccatctctctcacttgcccatcataacaagaagttcagacagcactactgaagacacaacacacttagggtgcaggatagagacgtgtcttaaactgatggggaaacttgctccctgctctctggctttcacagtgctaggaaaggccatgtaggctgctgtggaggaaatgacatcaatggtctgaaccagtgctgtatcttgcagggtttagtgaagacctgccaagcaagatgtgcccactggtgcaacagtggtcacagtgtttatgggaataagcaagcactctcttggtgggatttgaggcctgcacttcaagagggtacttgtatctggtactgaaaacatggtcaaactgatagttagggatgtcataggccttaggagagaacttatagatgatgttttaccaaatggttttgttgtcaaactccattccaagtatttatgcttatactcctagattgttgctttcaaccttggtcatagaagcttgttatggtagaggatgatggttaatgttggcgccaaaatgttcaacctgttgagagtgaatggctgtgagtacccagccatggacagaacatctatatcaattcccttcctgctgcccaaggaacatttctgaagcagagactctaagaatgtaagagctggaggttggggaggaatactgtgaagcccgggcctctagacatggcatggctgtcacacacctgagctcacaactcctgagattgcctacaagactgccataagattgtgagagttaaaacttccagcactaagggggaaaaggctccagactaactcctagctgaggagctaatgaggggctcgtggctgctgagggacagtcactttttttgagggggaatggtcattggtagactgccaatgccctagtggatgacccaacccacgggcatgtagacaacattaattggtctcgtgggctctaaaaataaaataaagacataaattggacaggtggcaggaggcaagttggaggtgcatggagctggaagaagcaaatggtggctggatattactaagataaattgtatacatatatgaagtttttaaaatgaaaaattaatggtagaagcacatgaaactgcagatgtgggcttattttggaagtttctggtgtgaatgcagcatgtgtcaaacagcacagactcagcagcgttagttctgattgcaaagcatagggatgttgtatacattggcctacttggcgtggaggtgaatgtaacaacggctttaagatttgtaattagcatgtgcatatatgttcctcatgcaacatctacctcagaaactgaaatggttgcttctttcaagaaaatacatattgcctgcacctggatccatgagtatgatgtgtattatgtgactcttattttaacttggatagtcaattacatattaatggcatcctcataccaaaaaaggctttattccttgagaggtatgccatgatgttctgtgtacatgacagtgttcttggcaatcaaaaggcaatcccctacttccctctgtcaacatcaaagttaacaaatttcacggatcaatagaagtcattggactgtaaacctgtatttgtaacttctaacattgtcattcacttacatttttcttcaagccatagacatttaaaaaaaatgtggcaacaaattataaaataaacatcagaggcaaattagcttcttaaacactaaatgctgctctaagggcttagcgggccttaagcgttcccctttgtctagtaggatccagctgtgactcacagtgatgacagtcttagctgtgtgaggctagagcccaacccccccccagcccttcatcaaggctctgtggcccttgtgccaggttctggtgctgtggcctggtgcatgattgatacaaatgctggaggaagaaggatgccacacaaccagttagatctccggggaatacgctgaggaaagctaggtcagagctgttagaagtaggtggtacttaaatttctccagctttaataccaaagtaaaatagggaaatttgaaaagggagagaatgttcagagtctgtcctgaagggattggcttggtttagggtgaggatttcagcataaaaatggagaaaaaaacctagaccatagtgactatgatccatttgcgtgcggttcacctggatcagttgctgcgaggattcatgcaggccgacctcccatgcagtcctgcttttgtgcagaagcagtttctttgtttgcctgtccccacacaatcagaacagcagcaccagcagcacccaagatggttggcagaagttagaaatgaaagtgctaggggctggagagatggctcagtggttagcgcacatgctgctcttccagaggacctgagtttgtctcccagcacctgagtcaggcctttcacaactgcctgtaatcccagttccaggggatctgaggctgtattgtggccactgtgggcacctgtagatggagcaactatgtgtgagagcaaacacatgcacccacactccaaagaaaagggaaaaagtcttggaccctgcgtcgggtgtgtggaatcagaattactatggacagatgcagcaccttcaattttaacagtttctccagatgattcattagtatgataaatcttagctggccttggactagtgttaaacatggcttaaaggtaaatgtacagtatgtgatactttcaaaggggatgattgtggtgatatattatttatgatttcttaaagcttgccagaggattcagaaagcaaagtcagccacaagctgtagtgatcaggcagtggtggtacacacctttaatcccaggagtcaggatgattcagaaagcaaagtcagacacaagctgtagtgatcaggcagtggtggtacacacctttaatcccaggagtcaggattaagaggtagacagatctctgttagttcaagtccaccatgacccacacaaaagtgaactgtagcagagctcatccctttgatcccagcacctgggatcacatgcctttaatcccagcattagggaggtatgtaagacaggaacaaggtcacagagctggcattcattctccagccacattgaggagaggaagacattgaagtctcaggattgtccagccatgatgaggaaagcatagcagtctgggatttcagtccggggtttggtggaaccaggattgccttgcagtcttcggtagagtaggagctagtggctggctgctttgcttttctgatcttcagcttgaattttgaagcccaatatcagtctctgggtcttttatttatcgtgttacagatgatgctgaacatgaatgaatattaactactttctacatatagggatttgtacaaggaagtgttaagattgagtaatacagccacatccctttcataggaatgacagggtataggtagtgaactaaatgctgatgtggtatccctttttggtacctgtaatagttaatcttgccaacttgatgggatttcagacacttggaaaccaacctctgagcatgtccatgacggagtttctacatcgggttaattgcaatgcaaaaccccaccttctgttgggtgaggctgcaggacagactgaaaaagagcagtgtttctccccctgctttcgtactgtggatacaatgtgatcaaaggccttaggctcctgctgccaggacaaactgcaccatcaaactggaaatcaaaagagacttctctccattgagttgctatcgtgaggtattgtgttaccacaatgggaaaataaaaagtccttggggttggggagatggctcagaggttaagggtactggctgctgagttcaattcccagcaaccacatggtggctcacaagtacctataatgagaccagaacctgtcttttctttctctatgaactctaataaatcaagcaagcaaagcccctctagattatggccagatgatgatcaaattagtgagtcactgagcttactatgactcttacaatccctgctcagaaaggaagaaaagagccttgtgaaaactcttccatagattgagtataaactccctacctctctcaagaactcaaggccaaccaatgctcaaggacatagatttttgcttgaggcaatctcactctgggttcaaatgccgattgacagcttaataaaaatcacattcattttccaaaatgctcttccgaaactccacattcttttttttttttttttcaattttccaacttgttttcctcatccttaaaaaaattgtttccacctccatgcaaataaacctggaaatcaatctgtttatttggttgatttacaaaacatgttaatgtgcccgtgggcatgaatatagcataaattacaagctgcataagtgacagtacaatggaagcacaaataaggaaaagctcagactcacatgctacatatttaatatgtcttctttctgttattaggagaaactctgtaaggttccgaattcatttcttagacagttggtagtcacactttttttttttttttttttttacttccaccgaatacaaaggactttatgcaaagactaactggctggtgggaaacagaggtcactattctgaagtagccccagtgactgccttcaggtgagggaaacgcctctttcaagtttgcctttttacttttccatatttgcttctgtggctaacgatgccaaggacagctgctacacaatgagccattgttcagaaggtgccatttaatttgcatcatgatcttctggagttttgaaggttttcctgtgaaaacttccagatattcaaaatattaatggtctcatactgaagcatggatctgtcttctctaggcccctagcatatttctctgtgtggttttggtccatgccttgtactccaacccagtgggaattccctgccacttctcccttgtaacctttcctccacatcaataatgctgggcacagtctacaaggaaaaaagatcttctactctgaaagtcaggtctcatgtctcttttattttacatttggcaaggcaggtgcagagtgtggtggctcacaccatcaatcccagcacttggaaagcagggccaggcagatttctacgaatttgaggccaccttggtctatattgagagttccagggcagtcagggctatatagtgagcaccttgtctccaacaaagcaacaaacaaataaaacccagctgtatcacatttaaatggacccagtggctttaaataaaatggcttatatgatatttaccaataattaaaatatgtgaatgaggttttctttatgttttgtgtgtgtgcgtgcgtgtgtgtgtgtgtgtgtgtgtgtgtgtgtgtgtgtgtgtgtgtatacatgtgtgcaggtgcatgtatagatatggtgtgtgcatacatgtagatgctagagtgcagccttgggtgtcattcctcaggctcctccttccctccctccctccttccctccccttccctctctccctccctccctgcctccatgtccttctgtatatgtgtttctcttattggctgatgaataaaacactgtggccaatgaggcaggcagataggtggaactaggacgaggagaattctgggaaaggtaaagaacatgatatgtagccacaaaagatataagaggtctggacctcaagctcacctctcagtggcctaagctagctggccagtgagctgcagagatcttcctgtctgcctgccaaatgctaggaatagagcgtataccatcgtgcctggatttttctatgtgtagtctgagaattgagctcaagtcctcgtgcttgcatggcagatgcagactaaggtatctctctagtcctgaagcttttcttttatagtcagaaatcatacggattcttcatcttcaacttaaactgattttagatttgaaccattagaactgtgggatgataaagtctttaaaaaaataaagtgaatcagcttcaagtatttcattatagcaaacaaaagcaaccataagtaggtaaatatattcccacaacctgtgggtgtgaccgtatttggaagaagcatctgtacatgtagaattacgccaaggatcttaggatgatatcctctgttgtgcttaggtgggctctaaacagataccttgatgagatccagaagaacggatgacagtgatgctgaagagaaggacacagggaggcagagagcgaaatcatgcagtggggaagtctagtagcatggaaaagctgaagagaagtggtgcctctctgagaacatctggagagagccagaccctgttggcagcagatggctgcccatgagcaggtatgctcttgtttaaagtcatttgtggcatttttgctatgaaagctcttggaagccaatgcacccacttaaagaaacaatagatggaatgcaaagagccagatttctcatcaatgaataatactagcatcaccttaaaggattgtaaagaatgagctttgaaagacctcaacagaaaagaagttctttcccggttagactatcctgatttagctctaagcctccctggtaggagtggagggccagggacatttgggggaagccagcacaggttcaaatcacctgtattgttctgggtcttgagaggtcgcagtaaccacacagtggagttcccagtgggggctggaactatattagtaaggagtccacagtataagcagatctgacgatgttgagtcacgtttggtgaattgatctgggagactgagaggcccagggcctggaagacaccgcctattaaggttgtgtgagctggttagccatgggggagccatcctttggggtgaaggctgcaactctgaacttattttgagagattcttcagtagttgcagaatgcacttgctccacaatagactagaatcctgtagtatctccagtgcagccttgcctgtgaagctgccaatagcatctctcctgagggacatatgtggctgtgctcctgtgcacctctggtcatgtttgcatgaacggatcgatgcgaaagctcatttaatgtggcttcctatttagatacttcatttattctatcgatggttcatgtattacactagcacgctgtaactcatgcctgtgcaaaccttctctagcacacgggtgctacccaggtgccacagtcccacaggtaggaatgctaatgagcacttgtgcactacctggggacactttcaacaataaattcacccatgaacagcatcaataggtaaaggctttggaaagaacacacccttacccttcagagaatcataaatggaagtcaggaagcactttcattcacctctggggacacagcctcaggcaactcaaaaatttttcacctgccttgtttctacaaatggccatgatagtgccactaatcttgatttggagacttggaaacacattttagccacagggcaactttgcaaatgtgggatctgccaataaggaaaatttgatttgcttcttaggcttcgtgagatgcagatacgatcaatcatattttcttagcttgggaataatctcactagttgcatggagtcacagtcccaacctgggtgacttgtctctacatatgaggcctaaaagtcagcagactgtctagattgtggatggaaacctttaaatcgtgagtcaaaatattttttttcttattaacttgttcactttagctatttgttacagcatcagaaagctaacacagacattaaaatgatgggcttatgtttttccttttattgaaaatattcttttttcttatatcttgattatagtttctcctccttctattcccaagtccctccatacttcccttctcctccagatccattccctttctgcctctcattagaaaataacaggcttccaagagatcacaaccaaatacaacaaaaatatataataaaataaagcaaaagctataatattgaagttggacacagcaacccaacaagaggaaaagagtcccaagagccggtacaagagtcagagacccactgcttcccacagtcaggagtgatgagcatacgtttgtatgtgttttaccattctttttttgctttttcatcatttgttttctttttcttttttgatgacttaaaatgtttatttttttaaaaagttagttgctttttatacagctacacaaagttcttaatgtttctttggcaatggaattttacaacacacacacacacacacacacacacatctttgctgaagaaacactatttacctgtgtgtacatagttgactgacaaaattctctaccatccagcaccctaattaagttttgaaataagatacctcatattataggctctccaaaaagaaacagaaagacacacacacataaaacctgtgtggctcaaagcacagtatcacggcctaccttcaggcagctggaagtaatcaccgaatacaattaatttgtgacaagaaattggaagccttcagtgattgaaaaaaagacttagccagttccattcatcttgctgtggttcaactctggcaaggatcaccgccttctgctcctccacatacaccaatgcttgtgtttcaagacaagccatcctgccctaaagcaactgcagtgcggctttgaaatgaagcagaaaaaaaaacccagtgctggtgacagacagacagcaacctcacttcttcattctttgctttccaggaccatgaagaccttggagtcccctattttcaaacacttgtttgtagactatgcagcaactttgttgtctttttttcagaaagcagtatgaccaatccagaccttttagggttgaaaagccatggttttcctatgttcaaaatctgcaaactctcttcgcccgtgaccacccaccactgaattcaccatgaaatcctcgagggacagtcaaagtccttcattgccacatcctctgccactgtggaagccaagacctcctctgcctggggagaccctatggtcatgatttggacaaagctggattccagttgttttagcatttaatttagcatttcttcagcccaggttggtcttctttttctattaccatcacaagaaatgctgtcaaagaagggtttagttttgtcctaatagcagttgggtccaagaggatcttcttcttcagcattccctttgatgttttgagtatcaactctgaagcctcctttatcttcaccattacaggtttctcttttaatttaagtttattatgaaactctcttttgatttcttccttgttaaattgtgcatttgtactttcaaagtcaaagtctttctcaaatttcattagactatctcgactgatagcaagcaaatcttcccatgccatctcaatgacccccacatcttccccttggagcagaaggaacctggagctacttgcctcttgctgtcacttgtgagctgctcattttctggccttgtaactctgtgtacttcagctcatctgtactcttggttgtctgttggttctggctggtagatggcaaagacctggttggtacagggctccttctcctaacaggtgctagagtagctaagtggaccgaggctgtctgtattgcttgttccatggttgggcctttgctcaaaaggtctaactgagggcttgtcgaccttaggctagctgtggttttacagatcttgtagcctgtgtgaaggcagaactagttgcactgctctgtgataatgcactgctacccaatgcttctgttccaaaggatgtcaagagctcccagcaacaccaatgacttcaaactgctgcccaaccaatgtgctcagactgaactgactgtatactggcatcctgtcaaagggtccataggaaaccactgactggaatgaagaagctgagcaaatgaaagactgaacaatagctggatcctgaggcaaagaacactggttttggtgcctcgcaaacagtgacgtctttgatatcacttccctggaatataatacactcaaagacttcaccttgaggtggagttgggctgtcttctgtaccgaaggatcgaaccttggtgagggctactatggagtccttggagtcagtggtgtagaggatgcccttgtagcaaatctccaccttgaaaatgaggctgatcttgctgccgctcacactcaggcagatcccatgctgtgctctctgctccacatgcctgctcactcaggtggcaccccacagcagccacctcagaaccaacacaatggcagcctgtttttctttctttctccattcctttctgttcttttgagacataatattcctatgtagccctggctagcccagaacgcaaagtcctcctagcctgaccttccaagtgatgagacaatagatacataccaacatgcctggcacatttttttcttgttgaaaaagacattgctttactttgaaaatacctacatgagatgaggaaatatgttgcttgattgagatatgaactttttggtgccacaataagggatatggttgaagcattgctgaataaaatgtatatactgtcatgggcaatgggaattggactttgtggtttaaaaagtaggacatagttgagtgggttgggaaggtgggatgaatctgggaggagtagagagatgggtaaataataaaaagatgctgtatgattctcaaagaactaataagatatgagggggaagtgggaggagggagcaggaagactcttgtctgagtttcttcaaccacatttttgctggaaggcagggcctgtgactgagggaggaggtgccaggcactggagattcctccagtccaccttccaggtattgaactgcagaccagcaactcactgggctgtccccaagggaaacgggagagagacaaagggacacaagcttaccacactccacaccgaatgcatctccctccccatcctcgccgacttgtctgccgttgctgctgtctcagatctgcagcagatcggatctgatgggtaaattgccagcatctcctggacatgatgtcaaccgaaggttcctctctagattatctggagcaaagaagggtgagaaacctctcaaggcttgagacatggtgcttctggtattagtaaggttgcatatcccttatccaaaatgcttgtgaatcaaagggattcaggttgcaattttgtggataaaaacaaaataagatactttgagaatggaacctattctagagtttatatattatccttctgtggtctttgatggagttgaagacagatagttacggttacagttttcttcagttattataaaagataagttacccttctttttatttagacagaaaagaggagatgatgggggaggtccttctgtgtatatgattgtcttattggttgataaataaagtactgttggccaataggaaaacaagataggtgggactaggagtcaaggaggattctgggaaaggtaggagaaagcacagagtcaccatgtgagcccaggaagacaggatgcttgctgccggcttccgataagtcttataaaatatatagatttatgataattaagactgagctagcagatgagaaatcttagtcattggccaagcagcatttgtacctaatagaagtctctgtatgttatttaggaccttaacgtggtggtgggcagaacttgggcggcctggcggaaagtgcccatgtggcagcagggctcgggtggcttggccgaaagacttattgttacaggaatctgtgtaaacatgcaaataacttgtgtctcctatgtaaattatatatgtatgttgaaagtaattttatacgataattttagcatacctatatttcaactaacagctttcctcctactacgaggtcaggcatggaattttcccctagtggtgttatgtgggtgctcaaaagtcttctgacaggaacatgttatatccatgcatctgggctgctcagcccacacttggaatcatgtcagcaggtggggctaatggggatgccttggggcatattgtttctagaggaatagtgtaaggaacagatgaggtctggaatgtctcattgacataaacactccctcagatccatgggactggcaaggcctacagatgttgactgtgtatgctgatagtattgaccacagcttcctcttcctagatgactgtagcttgagactgcttcactacagagacctccccccgcccccatcatacgccacagatattagctaactggcctctcattcaacagtatatgataacctacctccttatgcagcaatatataataaatgtgctgtttccaggctactgctgtatctccatcagtgtgcatgccacacccattctcagcttttcttcagtcacatgctctcccactgagacataccacagcacccaacctcagctattcagtacatgtgtctgtcatttctccattcccctcccttcagtcaagacaatctcaaagtcatgaaggtactggcaaagtagaatccagagtatgagtttggtttctatgatttgacctggtggccctattggtctctgtagatggatggaaaagcacagcatagcctgccaagccaagccgaagctggcaaatggaggctgctcatctgtttttcagtaactcctgggttgatttagaaaaatgcattcacaagtgtgcatgcatgtacacacacacacacacacacacacacacacacacacagtttcacagtttgatgaccctgcaaaggaagagctagtgatagaaatgaagagatgggaaagagtgattgttgatacaggaaacaaatgtttaggataaaccaaggctagagttgaattcagtggcaatgcagatagatagagtgtctgccctcacagtacagaagccctgctcccttcctgctagtgctggggccatagctaaagctgcttattaaataacataatggggatgcagctctggagccaggctgtctaagaaattcctaagtccctttgtgaaatggggaggagagaagcaaggcaacaatgagccttagcatccagaagaccttaagctgtcaccattgtgatgccaccaaggaatgacttctgactacgtaccatagcagtacacaccttttctgggcttgcatttgcctgtgaactgttgtaggaatcagtgttgaccctgacctatcaactcagcataagtcaccagcctgtgtcccagtttcctccccaggacatcctagtacaacagccatgtcccactgctctgagtacagttagcttaagatggagttcgagttttgtttctgctgctgtgagaaaacactctgaccaaaagtaacttggggaggaaagagtttatttggtttacatgttcaggtcaaaattcatcactgagggaagtcagggcagaaactatggataaactctgctttaacctctcccaaacatggctacaggcagatctgattgatctagaccagtggttctcagccttcctgatgctgtaaccctttaacacaattccttatgctgtggtgaccccagccataaagtcacttcattgctgcttcataactgtaattttgctgctgttatgaatcgtaatgtaagtatccaatatgcagtttatctgatatgtgacccccaaaagggccatggcccacacgttgagaactgctgatataggcaattcctttcttgagactctctcagatgttccagatgttgaattgatagctgaagctaactaggacagttgaatttttattccctgaagtaaaatgaaaaaaaaaaaaaagaaaaagaaactgttatcattattaagctacaaaactgcaatcacttatggagggtaccactaagaccagcacatggccctatgaaagatgcttatgattcttattctagccaccattcaaattttatttagtacaacaccacatgaatactgaacaggacttatgatggggagataaataaataaataaataaataaataaataaataaataagtgctactaggcatagcatgaggatacctagtgccatcaaggtggggcttgggaagaaagaaggcaggaaattgctccgaggagctcaacgcaggaaacagtgataggataccataaagaggaccagggtgtaaagtctcctatggtcacagtttgagaccagaatctcagctcaactccaaagagtatcagaatccagtcccttcaatcaaagccaggaggcaacagatagtgagcatgaggtcaaagaaaagcagggcagggtactgtaggagagccaggaaagaagggttgggaagaagggttgggaagaaggctccttcaaagaatggaggaagtgagagagaagggaaactggattttttaaagcttgacattgttctttgtgtcctttacaatgccttctattatgagggcacagatgagaactatggttgattgaatgattaaagccccctgggctcatagctttgaacacttggaccccagttgtggtgatatattacttatgatttattaaagcttgcctgaggattcagaaaggaaagtcagccataggccatagaagccaggcacacactcttaatcccagaagccagaaactaggaggtggtggtacacaccttgaatcctaggactcaggattaagaggtagatggatctctgtgagtccagatctacacgagtgaatcagcctaaaagagaattatagctcacacctttaatgctgacattagggaagtatataagacagaagcaaggtctcagtagaggcattttcattctagagccacactgaagaaaggttacagtctgaggcttggtgagagtttatggagacaggaccagcccattctgcctgaggtagaggtaagaagctagtggccagctgctttgcttttctgaacttcagcttgaagtttgaactccaatatcagtctctaggtcttttatttttcacgttacaccaagttggtgaaactctttggggaggattaggacagtgtggaggattagccttggacaattagccttgttggaggaggtgtgtcaccgggggcagtttttgaggtttcaaaagactctaccaatcccaatgttctctatctcctacacaaggtgtgagctctcagctactgctcggatgccatgcctgtgtgcctgcttccacgctcacctccatgatgaccatggactctagccctcaagtaaacactttcttggtcatggtgtcttatcacagcaagagaaaagacaagagcatgtgacaactggttcagatttgaaaatgactttatgcaggtgtgtcagcatgggagactctaaaaaagaactacaagttctctgtggtagaggaccaacttatctacagaaaacaacagtgtatgaacaggttaatctgtttgtggagactagcacattttgaaactgggctgtagtaactttgggacagagtgcttggctcttagtacacttctgggtaaacagatcataatctcatggtgaatttccactctgagttaagggatgagagagagacagatatagtccttcctacacatggaccacttacatccgctgtatcattgcagctttggggaccccatagaggacaaaacataatgcctgttaaaattgctcatgcttaaatgccaatagggcccaaatcatatgaccaagtgcagtctacccataggggcagagtggtctcagagaacagtaaggttcaccctttggcttccatacctaaactgccttcaggtgcccgttgctcttccaaacttgtgtgttcagggctgttgccctgtaaggtggcagggcagtctgatgatctcctgagagcttgaggaggtgaggagccacagatttgcagtgcttgcagggagaatgtgtgtgcctggctcgctagtgcaggaacaatggttgtgtgccctgtatgtggatgcagggtagggcctgtgtgctccctgcatcttgggtgtgtgggtggggcatgcttctacagaagggtgcacacctggtctcctggagcaggtgtgtgcccccaaattgattgttgaaaataaatgcagctctgctttctggcttggaaaattcacgtgttttcattgttcagagaattagctgcaggtcaatggcttgagttttggcatcaacatagagattccccaattgagatctcatcctgaggaaagacaagtgatttccctgtggtgagtccactttgcaaccaaacttgccttgggactgggactccagactgcttagttctagttctctttgcttggcagttctctccctggctggcatttatgtctaaaatgttctgtgcctgaagctgtgacatataggagaacatggtatggctggtgtttagttcaaaaccataggtttcaccaaaggaagtccatgtgtatacgttctgaaatgtaagagacacagtgggtctgtgagctgtagaatggcccagacatagccaaaaaggtctatggtcactgtcctggaaaaaaaaagtttttcagtattaagtttaatattatatacatccttctagtaaatgtagaaagcagagcttcctagatgatcacagaggcaaaaatctctgggtttcctttaatccctaacccccaagttgagcagaatattgtgtgctgtcaaatggtcctagaggggatttcaaatgactgtatggggcattgtattcttggtccacagtgaagacagtatacaagttaactgctaaatctccaagccacacttggtaggcactcactaaatccctgagggctgacaaagcatcctgacacgtgtttctccctctttcatagacaatatgcaaaggtttggctgtaacaaaagtattgcatgccattaaagggctgtttaaggaagcttgaggtttggtcgggaattcagaactttactctgtggctcaaaggtgtcttttgagtacagaaagggaaggagtagtttttcaaaggtgtttccatgggaaatccagagatgacctgggtgtgtctgctgcagcaagccagtgtctctgtcacaatatcctacatagaaatgcagaagactaagttaatatttaaactttacccagttcctttcttataaacatgtgttaagagaaaaagtgtgtaaggcccaaggtgtcttggttgtagactcttccacatgttatccaatgttttgtctatgatagcggttctcaacctgtgggttacaacccctttgaaggtcaaacagcactttcacaggggtcacatatcagatattatgcataccaaatatttacattactactcataagtagcaaaattacagttatgaagtatcaatgaaaataattttatggttggggtcaccactatgtgaggaactgtattaaagggccgaagcatcaggaaggttgagaaccacaactctgtgaggacatgatggttctacagagagggatgggcatacacttggtataatagatggcattcaaaccagtctgtgggaataggaaagacaattcaagctaaggtaggttgtcatagccatggattttagtgaatgtcttgagaagtattcaccaataagcagagggatacaccctcaatcctaatacacattcaatgaatgaatgaagttattcaaattgagtgccattgtttggaaagttttagaaagaaattgttatggaattttcctttaaagcaatttgtcgtattatattggcaactgtctctctgagggtaatgtctaggcagagcaaattagagaactatttactaaacgaacagtccaggtacactcaagtattattgatggagtggcagaattttgaacagctaagatttattttagactgaagatggctccaaactgtttatcggactttgggggggggaagcgagtctagacaatgcattttgagaaattacaatttattaactcaaggatttactaaatccagaattagttattatgtaagtagacaatgacaactgcctgcactcaaattctggttctgcctcttatgagccacgcaaagagttgttcacctaatttaatttaatctccagttttcatccatctgcaaaaacaaggatgatgatgcatactatgatgattaaataagtgatacaaacattgtttcaaaccatgtctggcatatattaagagttgaatcaatgctagctattgttattcatattgtattttctttctgcccctgaaataacaatttccttaggctgttttgaagggctagcaaggctgtgttttgtgaagatattctaaaagagataattaaatctggtaaataataacttggaaaatttgaatattttaggttcccaaattcaatagcttgtcatataaagaatagaatagaaaaaggtgatttatttttttctcatctgaagccctataaaattggtaacaatttcatgatgagagtacatcataggatattcatcaagtgacatcctagcttgtaaattctgggaaggcattcactctgtcatttcttcacttcctaaatactttttgagttcctatcctgcctgaagcctgcttgagagagtgtttaattcatccttccattcctggcaccctccggaataacgaatacacagacagcgtcagtagctgcttcttcagtgagccggcgctctaagtcagggttttaaaaatcttgctaaaataaaacccaaagctccaaggagagtacagaacagaatttctcaaagaggtttaagacattggctttacttatagtctacagggatgttttaaaatgtagtgtattaatagaaaatttgagatatggcaaaggccaattgattaggggatatttgctgctgaatacatagtttaccctgcctccacttccaagaggaaggttcacctgctgtcctggaaggggactgtgaagaagtaccaggtccgtggggagttagaatggcaggtgagttcaggagtgcaggtgaaacagggcaaacaggcttagcgtggctagtttagatgccttcaataggttctggagtactcggcctgactgttagagatctggtcctggagtggttagaagagatggagaggggtcaagaacttggggagaccccaaaggaggaggatgaccattggtttgtttttggacgcattttccaagaggagttccttatctttaggaattggaggattctgggaaggggcagtgtctccaaggtcaaccaggtaccaccagtcatcaaagcatcccatcacacaatgttgggcagcatggtgatgccagggaaggtcagaatgtagagacagtaacatgcagggcaagctgcctatgtgctggcaaggggtagggcttgtggataaagactttaggtaataatatgtctcagttaaaaacgctgtttccttttctacatgtaaacaaagcaatcctggaaaaagaggggagaccaaactgagggagtgggcaggcttgactttctacttgcttctaaagctctctgtaagccccatgttgcagagctccagaagagagaaagtagaggctgaagctgcttcctcataatgcctaaggataggcccgtgtttctaagtgagaggggagaaaatgtcttcttccttttgtctcgttggcactgtcttctaattaatgtggaagagttagaaacatgtatacataagcctcatgcacacagtaaagtataaaaatgcagtgtgttttatctcgaaggtatcgtaggggggatgctaggctcttcattccctagtcagtgctcatctcattagacaagaaaaacagcagaagaaaagtcaaagcaaaaacatcctttgtgtagcaggaatgctgtaatcttcctccatgggattgcatggggtgggggtgggggctgaggcctgtaggcaagagtctgaagtctgtcacccacgtaggatacaggcctatatttcttttcttcagcaaatatccactgaacacattttgtgcagatcactatgtgagcagcaaatgagtgagatgagggtctctcctgtaagcaggacaagatctaaagacacagcaagttcattttagaataagataaatattttgaggaaaatgggcaggagagagagagagagagcaagagagcaagctgggatagggagggagaaagagaggagcaagggcagcttagggaaggttggaatggatttctaaggcattaatattgggcctgaggcaggaaggtaggatgaaaggatccagctcaactaaaagctagagggaaaatattacaggcagaaaaaacaataatggcagatagatggtccccaagcaaaggagggagctggtgaatctgagatagtcaaggtagctgaagtaaggccacaggggttgtgatgggagccagcgtcctcattatatggcaacataacaagtcctgtaacagtctggtagtgtaaataaccacctcagcctgttcttggcctctgtgagtcaggaaccaggcaaggtttggcaggcaattccttttggtattggctgggtcattcattggattcagttggtggttggtctagtgggagctgtgcattgcctaattcacttaggtttgctcttgagttggtatgatatttattgtgtcaacttagctgggtcatggttactggtattttgtcaagcatttttcttggtgtttctgtgactgtgtgttttgaattaaattaccaccaaatttggtgctgtcagctaaaagaagattgcccttcatagtgcctcatccattctgttgaaggcctccacaactggtgatccctagaaagaaaggattctgttagccttaggacttgaactatatagcactgctctttcttggggcttagactagccaacctttaagaccacaggatctcttttcttaggtaaatctctttgtaaacatacacacattctgtcagtcccgtcaaggtgaagagagttgagttgagtgggagccttggctattcatcgaaagcttgcatgtgggccttcacatgcttttctttccccttcatggcctcttcctcccatagctgcttcccatagggacacatgcttcccaggtggcattttccagagacaaggcagaaactgcattgcttatttgtgacctaactagacatcaactagtgtcatctccatcatatttcatagtccaaagtaaaccatatttagttacataggtcatgttgagctcagtagctaaatcaaacagtgtaggggtcgtgttttataagtgctatagaccagttcatatatgatataataaccatgcacacaaacatacacaccccataatatatcttatgaggataacagaaatagctgatagaagaacatgggttttattgtgcatcacagtaggcttcctaattacaggccccaggtcagtggcttctgcctcttcttggtgcagttaatgaagaactctctgttgagtgagtggaggtaaaggctagaagggttctccatctacagtcacaaactcagtcccaactgtcacttctccatatgcactgtatggaaaacactgtccttgtctgcatagacttcctgctccttatgttcttagtcccttgctactgtttagtcccagggactatttagatggcatttcaacatagctgagttcttaaagatgtgaaatgcagccagaaccatgccaagcaacttccttcttgcattgttatcttacaaaaagcaatgctttcatgcctctcagctttccaagaaggatgcttaatattactgtgctgagactttcagtagatgtgatcttgtgtgctgacattatgggatgtgtttcagagaagagaaagcctttcttcctccatcaggcaccagtggtaccttgtatgggtgacaaaggaaagcctgttcaaagccctgtgtggccaactctaatgacattgacacgaaaatcggtttttaaaaagcttgtttctctggccaaataaagactctcggagattcttttctttccccattttccatagactcacagagtcatggtctgttttcagtactgatgagtaagccagacagtaagtaaatgaatgccctttggaagagaaaagcagcctgaggcctcatgaggaagtgttagctagcatcaccacgtttttcctaaatttaacagttactgcttgaaatgaagttatttgagcaaaatgatcaaataccattgggtgatgcatttacgttttgtgtggcaagaaagcatgggatattgtcttggttagttttttattatatgtacttaaagtatataacctgatgtttaatatgtgcatatccagggaaatgattacttttctcaagtaaatgaaggtatctaccagagtaccctattgttttttttctttttctttcttttttttttttttgtgtgtgtgtgtgtcgaaactgcccctaaaatctattctctcagtgaattttgagtaatattgttagccatactctttgtcctcatttggtttctgttgctgtgatgaaacatcatgaccaaaagcaacttggggaggaaacgatccattctagcttctatcatgaagggaagtcaggacagaagctcaaggaaggagcctagaagcaggaattgaagcagaagctatggaggactgatccttactggcttgctctccagcttgctcagtctgttttttatacataattcaggagcagctgctcaggggtagccccacccatagttgactgggccctcccatgtcaatcattaattaacagattcactcacaggcatcttctcagttaaggttccctgtaggaagacatcttactaggtacctgtgatgctgaccatgcccatttgggtgtggccacaggtacctagagggcttatgggatttaggccggaggaggggacaggcttgcactctccatgttccaatcaggtctcagagggcagctgagattggatgctcagaacactgatcctggcttataggtttctcatgtaagtgatttctccccaataaaattaacctacatcatccctgtcccgtgtatggtaattttattccaacagttccctttttccaaatgactctcctttgtctcaagatgacaaaaaactaaccagtacactcctcatgctgtccattacagttttgggcttacatgggctacctgtcatgtccagcatgtccagaagacattgttttgtttcgcttatccctaatctttgacttgtacaacctttctgtcctctcctttgagattgtccctgagctttggggtgtgtgcgtaagtgttcacgtgtgtgtgtgtgtgtgtgtgtgtgtgtgtgtgtgtgtgtgtgtgtgtgatagatgccccacttgtggcttggctcctcattgactcttattctctgtgctttggtcacttgtgagtttctgtattaaccactgaccactgtctaaaaacacttctgtgatagagtctgaatagagtctgagagcaacactaatctatggatagagaaatacaaatgcagagagtactttaatgctatgtccatttagcagaataatagtcagaaatgtacacttgcactctgggtttgccagccatgggctcttgcccagaccaacagttttagacatgtttcctccgatggattggcccttaaatccaatcagaaaatatttgtgaccccttgtatcattcatgccattatagtccccagagcatatctttccatggtggtcattatggtttgcacagggttcacagttgtatgaaaagttttgaaaaattagcttaatatatgaagttatgatgatgaagaggccttcttctcccatagccttctattagaagtgacacatctgtcatcactttcatcttcccatgatttttctccttttcagttcccagtgctaagcccttcctagcttagttcctcctccattgcagccaagaccttactctccaaatttgctgctcagactaaaggggtttgtttgtatccccagtgcagcaggttttggtgcagacaaattcactcagaagtaagatcttatatccttgaagaaattctgtttctctagtgtgagagatttctggggttcccaagtcactcttgtggtttggttctttttgtttttttttgtttttattttttttagcctggctgttctgaaactcattccgtgcaccagtacaccaggctaaccttgaactcacagatttccacctgtctctgcctgccaaatgctgggattaaaagtgtgcaccaccacacccggccccaaatcactcttacattatcatatttgtgttcattcagcaaagatactcctttgcagtaggtggtggacatacgatctctgacttccatgtgttttgaaaaaaggtaataatggtaccatttcacgggtccatagcgcccagcgatgttgtcctcaaaatctgactactttccctttccataacaccttcttgtgtttacccatctctagtctgagctagagctggacttttagcaacaacccctccccccaagaaagatgacttgcccatagattggggaatcttggatgggtatgtttggagggccttgaacccctaatgaacttagaaacctaatgagtgggtagagtgatcaacagtaccactcttgacatttctaaccttcagattgctacaatttagaaacatttgcacagattttgtaatggttaatgcatcaatgcaacaggctctagaatccccatggaagtgcacctttggaggatgtctgtggggggggggttctaggttgggtcagctgaggtgggaaaacccactctaaatgcacgtggaccatcccatggactggttcttgggtggaacaaaaaaggagacagtgatatgagctgggcattcatctctcttcatttcctgagttgcacatgtactgtcctcagcttcctcacacccctgctaccaagatgtccctgccattctaggttgtgtcctcatcctgggccaaaacaaacccttccttctgtaagttgcttttgccaagtgttttatcatagcaaaggggaaagcagccaagctaatgtcttatctctaatttcactactatcttgtgaggggcagtgctggtggccagctagggcaggtcacgtttgcccatttactagctttgtgaacttgaaagatatagcaagcataccagaaatttattctctcttggaagctggtgcaatccttacctcataagattatataaaaaattgtaataatgacaagtgagcatgcaaatgacttctattttgatagtgaatggagtaaaaattatctaataaaaatgatgtaaatataattttatgtgcagttatgacccagtcttgaccttttcatggaccttatattctagagccacttaaaagatacccaagtgcttggagctagcagtgtgatgggggatgtcctcttgcatgctgtgaatacatgtgaatacatcaacatggttgatgaccaatggacaggcaggatgtaaccaggcaagaagtagaggcagggtgaccagtctaagagaaacctgggaagaggaacacagaatgagtgactggggagacgccatgtagttgccgagggagcaagagatctgggcatcactggtaagcaagaccatgtggagatacagagattaataactaagagagagctagcccaaaagaaacctgagcattataattaatataaacctctgtatgtttggtactgaactgctgtgggactgggaggaacagaaacttctgtctacagctgaaggtcccctgtgtgtgtatttgtcattgtaatagaactgctgtgtgcagttcttccacactcgccatatggccaatgctgccatttcagctctgtggaggatggtttcttctggtccttctgtctgcaatgctgttctaggtgcatcctcttaccctgggacttcaagtatttgggtctttctcatactgagagggctcctcatgatgaaaagcatggcccctgctctacccaccaccatgcaccacagacatttttcttccataacaattttctcaacttgcaatgagacataaaagtagttttgaaaactgcatgcttggttaaaaccttgtactatcacaagccacaaatcacgagtgcatgtaatgagaaaccttgagagaaagagaagaggttgacccaaaggcttccaacaaggttggagcgcatttccaattagaaaccagaaaggcagaaagaataagggcaagagcaggtgaggtggaaggaccaggaaggctcgagcgatgcatatttggaatgtagtcttgatgaagttgagttcctggtcagtctctttggtacaaagtgcaaaaaggtctccaactgtattttgaatgtaactatagaaagtttgttgttgtctccgaggaagcaggaattgaccttgaggctattctgatgactaaaaagcttgctcaacatgtttgttatggggaactatatttactgactctatgtttatcttagaaaattgcctgtgttagagtgtttgtggcggaaaattggatttaatcaccttgttttgttgtgcgctgcagagctgtgaggaacagctcactaatgctcttcagtgtgtacccggagccagtgacagagctgagttcatttgccgattcatgaacatctaccgtgatccaggctccatataaggcactgagtttgaaatagcaatatgtcactatccactgctatgccccaaataactacaagcctagaagcttaaatcagtgcacaattacttcagtttctaggtgcagactctagttatggcttcgctgggtcctttgcagcagagtctctcataagctttattcaagggagtggtggggtctgtgaaaactttagggagagagtgggtgtggatattgacttcaattagtattttggacgttattttttgaagggtctcaattcttgttctgattggttgctagtacatacagttcttaacatatagtaatccacttgttactttttgtcaacttgatattcgttagagttctttgagatgagggaacctcagtagagaaaatatcctatcagattggcccatgggcaatcctgtggggacattttcttgattaatggttgatgtggagggacctagcccacggtgggtggtaccactcctggacaggtggctctgcatggtattagaaagcagattgaggaggccataagagcagactcataaccactgttcctacatggcctctgcttcaggccctgccttcaggtccctgctggagtataacatgaaaattgtaagctgatataagcctgttccacctcatgttgcatcacaaatcaatcaatagaaaccctaagacacatgggtttgctcaacatgatggcttctttcaccaaagccggggaaagaaagggaggggtgtgttgggattgagagatagtgagagaacaagcctaaagttttggtcttagcctatagtatttttttttaactccttgactctttagggggctaccatccatctcccaaataaatacacacttattgtttattatgaatgcctggccttagcttggcttgtttctagccagtatttcttaaattatcccatctacattttgcctctgggccgttacttttctctattctgtatacctttctttacttcttatactgtagctggctgtgtggctggctactggtgtcttcctctcctccttttcttactcctcctccttctctcttctcttcctatttattctctctgcctgccatccctgcctgtttctctctcatgcctagatattggctgttcagctctttattagaccaatcaggtgtttttagacagacacagtagtacagattcacagagttaaacaaatgcaacataaaagaatgtaacacacctttatatcatcgcacaaacattccacagcataaatgaacgtagcacgccttcaactaatattctacaacattagcccaatcatgaaagtgtcatcctttttctattctttacacattgggaagagcacgtgagtaggagaaagagaggtctttgagagctatctcagagtccactgaatggaacaaagcacctactttctagggcttatgtcctggagccttgaagacagcatcagaatcattgattgggaacagcttcctacaggcccatttgagaaaaatatgcctcacacttctagcagaattgttgctgagtgccatgggaggaatcattctttttgaagtcagtaatcagattcagtctgcccccgagaccctcaggtgtctgcagttgaacttcagaactaaaggatgcatattgaagcctcagagcatctcttaacagagccacagggatcagtggaacagaaaatgagcccaatgtgcctttggttcccctgcccttgctctggctgaagagctgggtaggaggctcctgcttacccagagtgaccatgttgagggaacttaagtttcatttcttgttagctcactgtcaccacagcctcatgtcttcatatggctgcttagccagtttttcttctttgtggagaagtctttggtttgtgtttatgttcaaacactgtttgaaatgcttttattaagtgactcgcaggggacacaggctaagctgtggtttcaagacccggaaattgatgtgaaacttttgaggctgcaataggaattagtgtggcatagaaaagagaaagaaagagaaagggagggaggaagcaaagacactgggcccctcactccactttttcctattaggaaacaaaagcaagccacccaagtagacgaacccaaatgtatttcaacagatcttgacatttataccagcatgaatttagaattttattttaaaagaaatagtgatggactatgttcaagctttaagactgtgcatatcttgaatcttttggtggcagaacaatcaaacattaaacccataagcaggactgggaatgtgaattgtggacactgctgacagcctaaccctatccagctgatgccccaacccagatgccagggtatttgcaaatacagtaaactaatgtgaacccctgccacatctggaaaaagactgagctacaggagaggagctggcctgatacatcaggaaggggaaaaaaaaaccaaaaaaaaaaaaaacaaagatagacttacctcagctgccaagatgcagagtcactccctggaaattctgctctaggctgggaacacaaaaggcttatgtaattcctttatgaacttgctgttgataaggctggctcttccttataagatcactggtctctgagtgggaacttttattgtcttgtctccactgaatttgggttgtttccttagcctataggaatagcatgtcagaagagcagagagaagaaagcgagacaactatgggtgtaaatattaagcttttaattcatgggataatagctttaggaaactcagctcaaggaggtgaaagatagttctagaatcacatatagttcacaaaaaatgcaaactagagctcaaactactaaatatcagtttacaccactctacaaaagattattcagaaaatatacttaggatacgtttcatttctggagtttttatctgttttgtttttgattatgtgtacatgtatgggtttgggcatcagagtgaaggtgccagcagaggctggaagagggtcttagatccctgaagctgcagttacagtctgctccatgtgggtgctggggattgaatttgggtcctctgccaaagccctaagcactcttaaccactggccatctctccagcccagaatgcattctttttgacaggctatatgaatttttgtctcaagaacagttatcaattttatttttcccttaaaaatagcctcctcaaacacccacagatatacactgagctgaactctggaacctagttgcagagagggaggaataaagatcaaaggggtcggtaccaggctggtgaaacccacagaaacagctggcctgaacacaggggagcacatggaccccagactgctgtctgggaggccagcacaggactgaatcagacccctgaatatggatgtcaatgaggaggcctctgcactctagggggcccctggtagtggattaatatttttccctggtgtaagaagggactttgagatcccatcccatgtgaagggatgcactcttggcctgcacacatgggggaaggcctaggcccagcccagaatgataaggtggactttgaggagccccttcgagggccctaccttgcctggggagtggagggtgaatggattaggggacaggtgggggtttgagggaagggttaggagggagggttggggggaggggaggaagaagggattgacatgtgaagcaagcttgttcttaatttaaactaaaaaaaattaattacaaaaaattaaaaaaaaattagccccctactcagccccagccccagccccacccctaccccaaccaaatattgcatctttccagtctggtgggtcatatgttgtctggtgatgagcatttcaatggcactgcttgctttctttacgttcccctgaattctaatgcagccttctcatttggttcttcaaatctgagatggtgctcccaccactctgtcattctaggaagaagcacactggggcccatatgctctaatctagtaagtatgcaacttttatagcaggaaggagatttttgttccttggaaaatatggtcctaggagttttatttagcactattgtaatgaactaattggcccatagcctttttcataaattcatcaatttctttttgcttttattagttaattttgttcctctgggaatgaaaccttcctaattagaatatgcgcctgaactttcaaataataataataataagacaaatgaggagatgcggttatgctaattctcacatctcctcaactaagcatcacttggtgttataaaaaggacctatgggtccctgcccccattctttcctaaatgtgttaatgtgctttggttacctcagttctcatgggacaaatcatttttgcaatttatacatagtacctatttccacaaaacttcctataaggtgtgggccagtcgtggtggcacacactgcaatcccagctgctgagggaggaggtgagctgcaggctagcatgggatacatgtcaagaccctgccttaaaattaaggggaaacatgccctataacttctaacctggggagttgcttgggaacatagaggggacacttctcccatgaaggccaaaaaatagaaacctagtgtttcgttctaagagatcatagtaaaataaataaataaataataagataaaactaacacatctgacaaaacaaacagaagggaaagagcccaagagaaggcacacgagtcagaaacccgctcatccgcacactcaggagccccataaaaacacgaagcaggaaaccatgataacatacatgaaaaggacctggtgccaacctgtgcaggccctgtgcatgttgctgcagtctccgtgagttcacgtgagttttgataaggttgatttagagggccttgtgctcttggtgtcctccatctcctctggctcttacactccttctgcctcatcttccacatggttctctgagtcctgtgggagggatttgatgggaacatcctgcttagagctgagtattccaaggaatctctctctctctctctctctctctctctctctctctctctctctcagcataatgtctggttgtggctctctgtatttattcccttcatgcagccacttttaaacataccttgtcggaacagtaatgccactggcaggtaaggactccctgaaatgcaaccatttgcacgattttggtggttatttagtcatttataataactcctaaatactcttctgtactagtaacactgcaccctgttaccagtaatcaaaagtaacccattatttaatatgattctttctgttgacagttcgttctaaaagacagagagacattattgttggtagtgggttgacccaggagtagatgagcttacaaaaagttacattccttctctatgtgccttgacatggtccttctggttgtctctgtggagatgactgtgatatgcgcagaatgagatgatccacgtagcatctagggaatggaggctcgagataaggaccacaaactatcattctgttgaaaccgttcaaagagaactcatcatttgtctcattttctattcaacaaaagtcactcatgggtcaccactgggacatccagccccttccatatatttttacttttatctggttagctattagtggtagaggctcacatcttcttttgaaagacccttagttgccgaagttttctatcaccttaaatgtaaccatgtataggggccatttaccagcacattattaagcatatattatgaagggaaaaataactagggctctcacaactgatagtcatacaatggtttgtttggtggcacaatattgttaattatttttttattgtttgaaagtttcataagttcatatgatgtgttctgatcaaacataactccccagttcttctccttcaattcttccttaatctctccttagactttttcttccaaatttcatgtgctctttcttaagccccatgagtccactaggttataaaagtatatttataagtcatataaaagaagaactccaggtggatcaaaaatcttacacacaagtaaggtcactgggctggagtgtagctcagttggtagagtgcttgcttagcacatgtaagccctgggttttatctccaatatagtgaaacagcaggtcctcccctgtaatcctcacacttgggaggcagaagtagaagcatcagaagttcaatatcattgttggatacatcacaggcaacttaatgcaggaagggtttattttgactctgggttgcagagtgcattgcaaggtgttgggggtggtgtggtggaagcagcctggagatgatcacatccttgtgggtcaagaagcacagtgagaaatggccagaagcaggctataatccacaagactcacactacaagacacatttcctccagtgaggccccctcctaatgttctgcagcctcccaaaccgctttgtattgtgttgagggaaagggtgtcaagatttcactagacccaagataaatgataaatgggtgtttcttgaggaacacttacacaaataataataaagacccgcgggagtgcttgtctgcccttcctatctgattgggggacccaagggagaaaagagcaccaccaagaccacacctcacacttccctctctcctcttctatccgcctgaagccacacccaaaggggtgtggccaccattgtaggttcactagcaagacaccactacattgtattgattatatttctgaaaaatcaaaagcatttctaaattcttattatagagaaaacaaaaataagttgttagctaatctaaaaaaaataataataaagaaagcataagtctaccaaactgtactgacaaggagaagtaaatattaagcagaaattttaaagaattgatgaaactactttgcactgcttaagaaaaacaataaataacttttataaaattgatcccattaaacataaaaattcaaaacagagtgattatcatggaaggaaatggaaagcaaagggtatatgtaagggtcccacattaaaagcaccaaactcacccagatgatattgtaatgagaagctttcattttcatttctgagacaaggtcttactatgtagactacactggcctcaaacttgaaatcccccttttctgcctcctgagtatcagaggtcctagcattcaacactcactaaaagtcttccaaagttgagaagaggactgtggtggattgaatgagaaatgggctctaggctcatgcttgtgaacatttggcccccaggtggtagtgctgttggggaagattatgaacttaggagttggagctttgctggagaaagcatgcctctgaggttgcttatagttatggtcccacctctttcctctgtggggttaagagctgacttgccttccctatattgatgggattccctatccctctgcaacagtaagccaaatcattttgcttaagttgctcttggtcatggtattttagcacagcaacaaaagagtaactaatacaagttaactttataaaacagattatcatcaatccccatagtataagtagttcttaaaaactgtaagccagtcttagttataactactattatatatatatatattttttaaaaaaagctgtacagaaatttagtaaatagacatcaatgaaacatttcttgtttttgttgtttatttggtttggtttggttttaattttcacttttgaggcagggtctcattatgtagctttggctggcttggtctagaactcacaatgtagaccaggctagcctccaactcatcaaaatccacctgcctctgctcccctcatgctggggttaaaggctattgccaacatgccagcctgtatccaatgggacattttttttttttttttggtttttcgagactgggtttctctatgtagctttagagcctatcctggcactccctctggagaccaggctggcctcaaactcacagagatctgcctgcctctgcctcccgagtgctccaatggaacatttttaattgctcagaaagtttcattctaagaatattagaaaaatcaagtaatttaatttgttaattagatagagctaatgaggggcaattacatgatcaacacagaagtagcaaatcgattagaacagcaccataccttctagtcataagaaaatagaaactatgttgtattagctgtaatactataactcagaagccagtgaaagtggacaagcaagaggcttatctgtaacagcctggaaagagacaaaaaatagacatcatcttcatggctctttatcacatgcctaatgtgtttgccaatgagattaactgagaaagctgtcaaaacagaatgatctgaaatacggaggtataaccgagtccttccttatctctaacccagagcagaatgaatggaagagtgcctacagttcatggaattcattagctagccagtcagacaatgcccaaagattgattgccaacatgtgtgcaaacaaaagcaagctagacaataaatagaggaaaagactcagttgtggcttgaatggcaactgtctgccacagccttgggcatttgggtgcttcttctgcaagctttaaaggctttgctcgcatttgtccatatctgcctgctgcttctaccctggcattatctatataatggactctaacccttcagaaccatagagaaaaaaaagtctttcttctgtaatttgctttggtcaggatgttttatcacagcaacagagaaataactaatacagactccatatgtgatgttgacagtataaaagaaaatatcaatgcacagtgttacccacatcctgtctgggatactagaatatgactcttgaagaaggggaaacagctacagcatgttgctaggatgacagtctcaaagtgtctctaatttcatagacagatttaacacacaacctcaaaaaaaatttctgattttgctgcctctacccaagaaagaaagcttacgtctgctgatcatgtgtgaggatatgcaatcctatgaattgagaaaacattgcagaagaagggaaatgacttgatgcagactagaacaacctgacagccctgtgttccagaaggtgttaccagtcaaatacttagaaaacaggccaatgaagagaatagaaaatccacaataaacttagctgtatatgaatttagtgacagtaaagagggtcacttaaataaatgagagcaggtaaatggtcctgggaattttagattttaaaaatatggatggtgacattaattggatcagtttattaatgtacccctggttaaatttagagattaatagtgaatttattttctcagagctgtgaccaaatatcagacaaaaagcaacttaaggctggatgattcatattggtgctgggtctgagggtacagtccaccctggtaggaggcatggtgttcccattgtgctgacaagagcctgagtttgcagggagagaaagctccagaagcagaacacccattttctccatcatggccccattttgaaaagttcaacaggctcccaaacagtgtcaccagccaggaacctagtattagcctatgggggacattgcatattcaaaccatgacaaataataataaaattgaaaccatatggatattagaagcaaacagaagtctctataccacatggctaaggagagcgttccaaaagcctcaaaattcagacgcaataaggaaaaatgggaactcatttggtaaaagaggtgctataaagtgtatatgagggaaggtgacaatttgggggagcaagattcttgcagcttataatgcagatgaagatttaactttcctagtgtgtaaagagatgctgaagcagagaagttactcaggaacactgggctagaggtgatgttcagacaggcagatgaaaatggtgtctctctgaaaagaggctcaaatctaaacaaatagagaaattcaaatttacaccaaactgagttactctctttcaccactcacatttagaaaaacacccaaatgttagcagcatactctcttggcaagaccgagaaagggagcagcccagtgtgctgtggtggtgtaacgcagtgtcaggaaggtagggacctgcttgtggagatctatctgtaaggtagaatgggcaaattgtaaaatgacacactcctaacctactttttacagtgctatttttaagagtaagtggttaaaaaagttaatgtcattgataaagagatcatacttggaaaaaactacattattaaagaggaatatcatgcagctaccaagaagtgtggtggatatgcagaacacacacacacacacacacacacacacacacacagagagagagagagagagagagagatgcatacttaagtacatatacacatcaaatacatacataatacatgcatgcatgcatgcattcatatgcacacacacttttatgggctgatacccagtttcatatgttatttatctaaaatataaagtgaggagaacgtttgtattgttaaatatgctatcattcaactaggcaagtctggtctatcatctgtctgtcttgttatgtaacactgggtagctttaagtggtagggaatcctgacactgtagacctccacaagaactctgctggcggtccaggaactccagtaacatgcaagatcagcctgtaagctgcaaccaaggaccccagaatccctggagagtttagcacatatagagagggctggagaccctggtcccattgctctgctccaggatttgtaacactaaagggcactgctggctgcttccacgtgcccaatgtatctgcttgctgctaccaaacacggggatgatgggaacaagagcagccagagaccagggactgtctaactgggtagaaggtcttgctgtcccacaaattgtgagttttcttcatgtggcctgtgagaatagaacctactccctgctctaagctatgctcagtctccattgtttcctcaaagattttaagcatgttattgtccaagcctaaagcgttttcctccactgtgtgcagaaatgactatctgcaaatatccaagggggtagaggtgaggctaacaaggctctgtgtctcctcttcccactctttgtagttttctcccttctggaaatctggactgtaacctagagatgctttgattgtcttggactctgtacccatccccttcatctgggagttgactgtgcctggtttgtactgaatgtcagcctggagaagctcaaagcaatttgccagggcagtcacatgacccacttgcttgtttatttagccttactgtttttttgttgaatggaaaatcaatttcttaagaatcattttaaatttatttttcttttgagtgggaacataattcaatttctgtaactccagtaccttgctgggcataaaaattagcaattatctcctttctaagatctatttttcttacttttatttatgtgtgtgagtctaatgagtgaatgtgataggtatgtgggtgcccacaggggccagaggcattgagtctcttggagctggagttataggtggttgtgagccacccgacttggatgctggggaccaaacttgggttctctacaagaacagcaacttaactgctgaaccatttctccagacccacagcagccttttttaaaatgaaaagataaatcatgatattaatgggaacacataggttagggctgagctcacccctttgtttcttagattattctccagtgggctttttcctttgactagccatgaaaactgctattatctttttaaaaaagacaatcttaagtatttttgttcaagatgtccttcatatttaaaaaaaaattgttctctcccttgtgtcaatcaaaatttgcccatgctattttctttctgcctgaagaattttaatgattcagttatactggcaatgaattatttcttctcctgtgggtcagaaaaaaatgtcatgcattttttaaaaatgtacttttattggtcctataaacacatacatatgtagggggcaaacttgttgtgtgttttgtgtagagactatgatgtctctccagcatcttccagacttcatagttcacattgagaaatctctgcttcactctggaatcacttttctctactaacctgatctttatttttaaaaattgttatttgtatgcatgtgtgtggttctgtgaacacatgccacatgtgcggagcttatggaggtcagaagagagcataagaccccctgatctagagttactggcagttgtgatctgcctgacttggttgctgagatctcaggtcctctgtaaaagcaggaagcactcataaatgtagagccatctctctagccccatatatttttataagtttgatcacaacatgctgacgtgtgtttttttaaatttgtttttaatttttcctggaatatttaaacttattggattagtggaggaattacaaccttttcaaatatttcttctggaccttgtttccagcctttgaactctgggttacacgattccatgcagtctctgctcttggatgctctgttgaattttccccattctgtagtttttaagtttatgtttgaatttagataatttctattgatagacccacttggtagttctttccagggctctgtgtgtccatcttccatctggcacttcacaatatcctgtacttgcttgatttctaccttttccatagggtctccatcacagtcatctggaagtgtagaatctgggcttcttcttactggtgcccttgtgccttgacatatgccatttgtctgtctctgcaactggtgatgtgtgtgtgtgtgtatgtgtgtgtgtgtgtgtgtgtgtaagagagagagagagagagagagagagagagagagagagagagagaatgagaatgcctatattgcctgcatgtgagggccagaactttattttccacagttgcttttccactttttttttttaagaatatagattttctttattttcctctcactgtacgtggaacttaccagctggctagactagtttgtcatcaagccctgggaaacctcctgcctctctctgcctttccagtgctttatagtcatgtgccatcaagccttttccatgggttctggagacctgaactcaagacccccagcttatgctgcaagtactttaccaaatgaacttctctgcagcccctgaaatgggtcattttatcttactctctgctttatttttcttggttgctaatttctgatttgtgcagtaaaatgtggagtgaggaggatgcagtgggtggagggtggggtgaggaggatgcagtgggtggattgtggggtgaggaggatgcagtgggtggagtgtggggtgaggaggcagtgcagtgggtggagtgtggggaggaggatgcagtgggtggagtgtggggagagaaggatgcagtgggtggagtgtggggagaggaggatgcagtgggtggagggtggggtaagggggatgcagtgggtagagtgtggggttagaggaggatgcagtgggtggaaggtggggtgagggggatgcagtgggtagagtgtggggttagaggaggatgcagtgggtggagtgtggggagagaaggatgcagtgggtggagtgtggggagaggaggatgcagtgggtggagtgtggggtgaggaggatgcagtgggtggagtgtggggaggaggatgcagtgggtggatgcagtgggtggagtgtgtgggggtgggggatgcagtgggtagagtgtggggttagaggaggatgcagtgggtggaaggtggggtgagggggatgcagtgggtagagtgtggggttagaggaggatgcagtgggtggagtgtggggtgagaggatgcagtgggtggagtgtggggagagggatgcagtgggtggagtgtggggtgggttatagggggatgcagtgggtggacagtgggtggcagtgggtggagacagtgggatgcagtgtgtgtgagtggggttagagggggatttcccgcatgtctgcttcagtctcagactctgaaaggtttcttgggtgtgaggcccatggacaggactcacagggtgttccgtctcttggaccagggccaggctggttttttttctgcctagtcgtcatctcacctgtgacaattcctctccgtctcccctcacggctgtctaaccctggacgttgtggatgaatggtcgtctgcatatgggcgcttccaccagcactgggagctctctttcactgtagctgtcaggtaggcttccttctcccctctcagtggcacatggctttatttactgtcatggtagtggcagataacctgcccaggacactgcctatccctcccctccaccccctccaggtattggcttctcttccatcaaaacatttcttcccctgttcccccaggacagatggggtgcagatggagctctatttgttttagtcacatgctgtgctcatgcaaggcccaagtacacacaggccaatctagtggctcccatatctctcatggcttgtcaggctctggctctcacccacttgagcagtgaatggggccagtgctaggccataggatgtttcccacccttctcagatacacccagtgggggctgctgagggggtaaaagagctgccgaattcgtgagcttgctggctgtctgctgttctgaggggtctcaactgtcaatgagctcggctcgcctttggtcattgaaacctcactccctcccatcttttcatgcttttacgttgtgacctggctctgtcacgaaatggtttgtgtcttccatttctcctcagaagttttaaatccagcttgcctggtttccttgcattgtcaactgtccaaatacattgtatgagtcagagttgtctagaggaacaaaactgatgggataaatgtgtctgagaacttattaagtcagctctaaaattgtaccaacaatgaaatcagacctaagaagctgagaatttagtagttacttgacacttgaagcccagatgctcgagaatgttatatattttacacacacacacacacacacacacacacacacacacacacacacacacacaaagcatattagctgcagtagggttacagaattgctcttgtgtgctttttctggttaattccaaaattgtgacttattcaacatatccctataactaagaacacagaccttgcttcatctttattgggaaaaattaactttcacctgagaagatatgttcatagctttcttcattatttactcttggttactccctagtggtggcatttttaaagcaactgacagtctttattagtaaattatctgatagtatcaagaaataaaaggagagctacaatagagactcaagcttataagtcagcacacagaacaacagaaacacatcctcctagagacaaataaatattgctatattaaagaaagttaaaggggggaaatcaccaagctttctctaaacaagaagcacatctaggaaaagttagttccagtttcctccttgcagccttcctgaagacaaacctttcgtatcgcctacttacactgtttagggagaagaacagaaaaggcatgagatagacacccccagaaattaaacacggagctgtgggaatggaagcacataggcctttaaaactatttacctgtagcattgcgggggagagagaaagagagagagagagagacagagagagagagagagagagagagagagagagattcctttgctgctgctgctgctgctgttgctgtagtaggaatggactgtgttttcataagattggctctttaacagacatcagggatcccaagccatctgccctcaaagccaggttaatatttttctccagggactggattaggtctcaagcaaacaagaacagttgccacaaacatggattgttatcaaactgagcctgccccacctgggccccttgtagtctctctccacatgtgacctcttgcacacactcctgcttctctgttgagatgtagctgaggccctccccagatgatgccacccatggtagcctccagaaatatgagccaactttatgaagtgtccaggtccccatctctgctggcttccattctgtaatgtttctcttggcttctgggttagccctttatattactatttcacaaaaagctttgcttttcattttgattttttccaacttttttatttgaattagaaacagcattgttttacatgacaatcccagttcccttctcccacccgtcctccccgcaactaaaaccctatctatcacatatcctttctgctccccctggatggtgaggacttatatagggggtcatcagtgtctattgtattctttgggataggcctaggcccatccccgtgtgtcttggctcagggagtattcctctatatggaatgggctgccaaagtccacacctatgctagggatcattttgatttttgtagtcattattctcacacctggtatttaccccaggatttgggaatcttctcctttcttgaccctctaattaacagccttgttaaggccaatacctctggtcagtcaacctcattccatgtggttagaactctgcagcagagcaagacgtctgcatttctaccttgtcttctttctggtgttttgtttgtttattcagtgtctgatgatacagttcttatgacctggttaaccttaatccaaatcaacctccacctcgtaactctccattcactcagacctctctgggtgtcagtaagttatgtgtggtgtcctgtgtggatggaatctgtgtctatagtttaggtgagtcactagtgggtatttgtgtcatatcaccttgacaagtggttaattcatcataggtgagacagaacccctgtcaacctctacacattgatgcaaacttcatttttgtgactatctgttgctgtgataaaaatcatgaccagaagcaacttgagggagggaagggcttatttggcttttaagttatagttcatcgtcagggaaagccagggcagaaactgtaggcaggaacctggaagcaggaactgaagcagaagctatggaggtatgcttcttattggcttgcccctcatggcttgctcagcctgcttccttatagaacccaggaccacctgcccagtcatgcattgtccccttacaatgaaactggtccctcccacatcaattattagtcaagaaaatggtctacagccaatctgatggagacactttttcaacagaggttcctcatcccagacaactctagcttgtgccaaactaacaaagtctagctaacacactatcttattagccttatgccattttctttgagggcttaaagatagtatatccttaattgtttagccacagagaaatcatcataatgaaacaattcactgataagatatagggctggaatctttagaaagagttaattaccagaagttgacaaacctcccactatgttccccaaccctcttccttgagcctgttagccaagacagataccttttgatcgactttcattgcaacatatataataccgttgcttgctgcttcctccttttcttcccaaaagggagtttggcaaatccctatcattccctcatctcctaacccatgaccctcattgacatcctagcacatggcaaatactctcaactagttctggggtcatgtataatctttggctccttatagacaactaagtttcaagtatctgagaaagagttctaaaaatcacttaaggtcagttggtacatgtctttttttgtagcataatttaattttcaagatcctggtgttttgtttctcttgatcacatcatatcaatttatacttttaaaagtttgctgtgagaattaagtacagtgttatttagcacaggcaattatttgattacctccctggtgctcgtcacagcctggcatttaatctggctgaggcctacagaccgcaatttgaacaatcagggtagttttctgtaattgcaataaatcatatcattaaccatgacagactgttcctcccacagactttttattttgcagtaacagttaactcctgaactcctcacgaaggccagatttcactgcagtcaggtgaattttatagtcatctggtggcatacaaaagcagcctaatgttggaaagacactggtgtcctgagagccagacctagaggtcgattggacttgatgaggtggagggttcctgggaatacggcacgcaccaaggccatctaagggagtaatccgtgggagtattacctgccactaggatgtttaatgtttctaatagtgaagcagatgaagatcaagatgtgagatgtacttgtattgttatattttggtcatttatataaaaatacacctgctagtgtattaagacttcctgggatgaaaactagaaaaagagaaactatgtttaaaggaacactttgtgctctcttttgtaagttcactttgcaatatgtccatttcatatacaatctgaaaagtaaactgtcttccaagctctatgatcataaaacctttcccactcactttatccaatgcctgaccttcatttactgtgatttcaagtcacatactttattgaatttaaatgctttttagtttttccctgaggaagtacactttttttaatgttttacggaaaagataatataacatttcatgtccagtagagcacatttttagcatgcctaagccatgaattgagtggccacacaaatgggcacagtatctagtattaccaaatagatttctctctttcttcatcctgttttccctcccctgggccatcagacacaaaggcaaagcaaaatgccgtttcaataatgaaaccagactaaaaacaagtgacagtccacatttaatcatatgactaaaaacaggctttattccactacctgatataattcatagaattgtattcagttattctctgaattctgaccactttgtgaatttctgtgatgatcttcatatgctactataaaaaagcttctttgttgaggggagaggttgtgaatattgtatttagaatgcatttcggaattacactgatttaggaaagtacagtaataggttctcttctagggtttactcctgcactagccatcaatgttggctaggtttacagtaccaggcataaattcccttctaccgagcagaccttaagtccaactagacagctgttggttacctccaatgtgtaagtgccacttttgtactcttgggaatatcttgtaatgctggttatggttgtggtttgtaggctttatagcttaatatgactttcaattgtttttctcctttggcaactgaatagtaactttagataccatgagaggtactattcagggaggaggctttcgggtcacttctagcttgatttctccaaatcctgtgttagaaatatgtgatttgtttaggaatagagacttaccttaaagttgtggaaagccaccagtggaaacagtactagcctgtattgtctcttggattctcctggccaacaacttgaagaattttccatgttgtcaccaggatttttgtaagacagtcttaagaggagcattaccacaccctaaatggcattacttcagttaaacaatttctatatgtatacatacaggcatgcatgcattacataaagcaatgtcttcctattgtgtttacaaccgtctttagtgttatttatccctcctccttccctctccctatgtgttgccttccatccctcatttccagataaatcttcccctctggtttctcctatttccccattcataggccccatgtcctatgattgtctatctcagcagttaccatgttatgtacttatatccaaagattcagagttggatccccaaataagagaacctgtgtgatttgtatttctgggcccatgttgcctcactctgtatagcattttctagtttcgcccctttactacggatttcatggtttaatttttctttacagcagaatggtattctattgtgtatatgtatcacattttaattatctactcatcagctgaaggacatttgggtttttccatttcctagccattgtgaatagaacagtaatgaacatggctgaacaagtgtctttatagtaggatggtgagtactttgaacctatgccaacaagtggtatagctgggtcatatgactgatctatttttagctctttgggaattctccaaacttatttacccactgactgtatcatttagcaatcccaccaacagtaaatgagggtcccccttttccatattttcaccagaatttgttgtcagttattttctgcatctttgccattctgactggggtaataccaaatctcaaagtacttttaatccgcatttccttgattgctaagtatgttgaccccttttataaagatacttgtacaaccaacatcatcataagtggagaaaatctggaagtaataccattaaaattaggagtgagataggactagaactgtccattatctctactcattttcagcatagtgcttgaagcactagctagagcaataagacaagagaatgaaatcacaaggatgcaaataggaaaagaactcaaattatccatgttttcagatgatatgtattatgcataaaatatcccaaaagttccaccagaaataatgattattttcaccagagtggttgaatacaaaatcaatctataaaaattagctgtctttctatatactaatagcaaacatgctgagaaggaaatcatgaaagcactcacattcataacctttaaaaaaaatctaggagtaagcctaaccaaagatgtaaagatctctacaatgaaaactttttatctcccaagaaagagactgaaagagacactagaagatctaaagactcccatgcacatggcttgatagaattaatgttgtggaaatgaataatcaacctataaaaggcaatttatatatttaaaatcctaatcaaaatccccacaacacttttcacagataaagaaaaaattcctaaaatccacatggagtctcaaagatctcaggtcaccaatgatatcctaagcagaaagggcactgtagaaaggatgaatgcaccagatttcaagatctcaagctgtattgaaaagctaaaggtatagcaataaacacaaaataatacaatcataaaacaatcatgtatatcaatggaacaaaacaggagacacaaaaatgagtacatatatatttacagccattggacactggaccaagatgaccaaaaacacacactgcagaaaagatagcatctccaaggaattgtgccaagatgattgggtgttcatatgaagtaggatgacattagacccatatttatcaccctgcacaaaaaatcaactccaaatggaccaaagacctaatgtgaaacctgaaatgcagaaccagatagaaggaagcattggcgatacaagattgaggtgtaggaaaggactttctgaataagactccattcgttaaggtcaacaaatgggaatgggacctcacaaaacttaaaggcttttgtgcagtaaaggaaacaatagattgagtgaaaagtaagcctacagagtgggagagaatctttgctagctacacatctgatagaggattaatatccacaatatgcaaagaactaaaaaaaattaagaaaacaaatgatctaattaagatggctatgattatgaacatagaattctcaaagaaatattttcattaaaatttatgtgttatgtgtcatttacacataagtgtagtacccataaatgccagaagaggggagccatatctccttgagctggagtgacaggcagttatgagctacccagtgtgattgctgggaactgaacactggttctctacaagggtagtgcacacccttaaccccagagctgtctctccagctccttattcttgttcacattacttgctatggaagatctcgacttagataattttactcttgccttctaccatccatttgttttcccaagcacatattttattcctattgttgatggtttgatcatttgtgccttgctctgtatctctaactcccctttgctgtatctctaagttcaataaaaaagcatggcattatgagtacctgaactcacttaaaacaggatcaagataccagttcacatctgtaaacccttgcctaccaagggatgatgtctcaatgctaagatctcatagcttgtctttcatttctttggagctttctttcttcagttcttgctgcctttgtgtcttgtgctgaatacctgggaggcaaattgtctgtgtctcgaatgacaaaacagtcttattttcccctcaaattcatttctgtctttactgattatagaattctggcttcctttccttagatgtttgaatacttatcccatcatcctcttgtgttcagtattaaattgagaactttattctcagctttgtaaaatcttctttcttaataggaaatctgtttcctgcctctgtagctttttttctatacttagcattttacaatctcactttaatgagacccactctgttgttcgtattctgataacttttcttccttagcatttggtggccttgcttccatgagtattttaggcctagtgattacactaatcatatcattgcatttcagaactctgttgttttctattccttagtaatagtggtttgtcattgcccttgttttatacatggaatgtcctttggcctgctgacttttgttatattaagctattttttacagcaattttaggtttatagcgaaactgattggaaggaactgaagtttctcatatattccctgccatcacacatgcacagattgcccagttatcaacatcccgaccagagtggtgcatttattagagttgatggacctatattgacacatcatcacccaaagctgatggtttacactagggctcattcattgtggggaatattctgtagatatgcacaaatgtgtaatgacatggacctgccaatatagaatcatgtagagagaattttctgttgaaaagatttcctttgttctactgactcatctttctctcctccctcttccctagtacaacaacatatgtgggtatatataacaatatttatacacacacccatgtgtgcacacatacacatagagtcaccaaacttttgcctttttcaaaatgctgtatagttgaaatcatgtagaataaaccctgtgtttgagggttgagctatttcatttaataatatgcatttgagtttaatgcatgtcttttcatatcttgggagtgaatttctttttatatttgtttattttatgtgtatttttcctgcatgtgtatatgtgcaccatgtatatgcctggtgaccatggatactctggaactggagttatgaatggttgagagccactatgtgcgtgctaggaactgaacccaggtcttctgtaagaacatcaaatgtttttagccactgagaaatctctccagctaccactaatttctttcttaaattcattttattggttattttgtatgtgatatattacatgtggtgaggggtggagccagctacaccaaatgtatgaagatcacagacaactttgggagtcagctctctccttctgctgtgggtccacagtggttgatctcaggtcatcagaccagcatggggagcacttgtatcttctgagccattttactgatcagggctcatttctctttagtcctgaatagtgttcattgccattatcttagaaaccacagattgtccacatagtgaaggacatcttggttgcttgcacattagagcagtgatgatcaaagtgactgtcagcatctggtgcaggtatttgggtacagataagctttcaactctgttaggaaagcttggcggggcactcttactggatagcactgtaaggtgtgaccagctttgtaagagacttcaaactgccttccagagtggctggaccatttccccacttttgcactaatgagtgtgagttctctttggcccctgtcctcaccacacttggttgtgtcagggttttggcttttgactattctagtaaatatacagtagcatatctggttgtgttaggattttatgggttttctctgatgacatggattaaattaaatagctttccttctttttattatatgtgtataagtgtttggcctaatatgtatatgagcaccatatgtgtcctggtaactgaggaggctgtggagggtgtcagctctcctggaattgaagttccagagggttgtgagccacatgaggattctgggaaccaaacctaggtcctctgcaagaatagcatgtacccttaaccttagccactgagcaatctcctcagtccattaaacagcttgtcatatgcctgctctcaatatattctttatgtgtttcctgttaaagtcttttgcttacctttaaacttgttttattttcatttctgattttttgagatgtgtattttaataacagtcccctttcagacttgtgctttgacatggttatgtcccttacttgcagagggctgtgggactgcacagcagtgacaactagcatttaatgagtctacccactagatgttgttggggagccacttggcaaagccgagtcaccagatgttgtaggggagccctacgtggcaaagctggtgaggctattgacactgaaggactggttgttcctgtctgtgacattcttgagtacctttacttacttccctaataagaacagctttggggtacttcccacagccttttggtggtgttttacacttgttgggcacacatataactgtggatggccagaagatgatttctgcttaagttgtgtattactgatgaatagaaataatagagtattctcagtcacaaagacagctttttagacaaacaagctaaccttagactttggagcaagttcaaagcaagctggttgcccctggggatgatatctagttgtccctagagacaatatctggttgcccctggagacaatatctggttgcccctggagacacatacacaaggtcattctcctaggtgttgtttgctgattcaaagccagagcttgaaacaacttcagtctgcacacagtcccagtcttaggcttgttgttattgttaagtctcaatttccaatgtcactttccttctgggaatcctcaccaacttagagctacatgcatgagtcaatgtgacattcctagcctgagagaaactatctaacttttggttttgagttcgggtagggccctgtcaaacaacctttaaattgttcagagtttgactgtgagaaggagagctgagacagaagaaagacagcacagaagaggcagaagatagagaaggagagtgagaagacagagagggagagcagaggagaggcaagagaggggggtggtgaggcagagagatgccatgggagagaatgagtgagtgagagtgagcaagtagagtgaatggatgatatagaagtgtgtattcgtgtgtgagtgtgaaagagagctgtgtgaaagagctgctgcttcatggaggaactgtgccgagaaactgcctaatgtgctgtgtgaggagaggacatgtaagtgagatgttagctacggctgtgtggagatttggagatttgtaactaactgaatatgtactaggcaggagagaaatatagagacagattgtcaagaaagagagcctataaaagaatgaaataaaggaggtcaccgtcaggaaaacctgtgctcgttccctttctcttaagttaccagcagaaagtgtgtgcttacatattatcccctcagagagaaaagtctggtgacattcagacttttcccccactactctgtggctttcccttcattaccctggagtggatctgcgggcgggggctgggactgcatccccatggtttgtgaatatgactgtggttttacattttgctctcttaaaggagaaatgatgatttaatttcagcaaagtccacattatcagctctttccatgtagttgtggtgctgtaactagcaagtcatccccaaaccttaaatcgatctggatttcataatctatggggttttgcattttacattaggtctgtgatttatttttttgagtaagttttgaacaaggtttaaggtctttctagattttctctttgcatggaaatgttccatggttctagcaccatttgtcgttgtatggcctttgctcctttgcaaaggtcagctggccctaccagtgtgtgagtgtgtgcatgtgtttctgggctttctgttctcttccatatctgttggcctattcttctgccagtcacctaactggtaattattgcagctgtgtgcttagcttttaaaggtttttaaatacagagcagtgttaagaggtgaatgactataatacccaacacacaccaactagattcaaccatggttaacatttaatataatactctttttaatcactccatggttactaaaacctctaaaaataaacctttctgtttacagaatgattgacatctctggttgcaatctcctgatgatttctcttggttcttttctttcacactgtaggtttttcttaaagaaacaatcctctaccactgaatagtattccatggtgtacaagtgccatattttcattatctgttcatcagctgatggacatctaggctgttccatttctcggctattatgactaaagcattgatgatcatggataagcaaaataaccctgtagtaggaaataaagtactttggggctatacccagaaacgatatagctggatcatatggtacatccgtttctacggttttgaagaaacttcacactcatttccacagtggctgcaccaatttacactcccaccatcagtgaataagtgttctcctttcaccacatccatgccagcatctattgtcatttgtaatatgaaatctcagagtgggtttggtatgtatttttctgatgcctaaagactttgaacatttgaaaaaccatctcttgcctgttttatttcctcctttgagaactttaagaactttttgtctagttccatgccccagtgtttgctagtattgttttcttgttgtttaaggtttttttttctttttttttgacttctttgtatgttttagtaactaaccctgcaggtgtatagatagtaaagatgttctcccatgagagctgcctcttcatttgaatgatagcaccctttacagaatctttttagtatcacacgggcctattggttagttgttggtttggtcatgatcttttttcttttcactttttgctgtcctgggtcttttgtgctttcatatgaatgttaagattatttttcaatttctgtgaagaattataattgttagtacaacatacatcatatagattgcttttggtaggatgacaattcatgatattaatattactaatcatgatcatgggaggtctattgaacttctgatatcatcttaaattattttttgtcttaaagttttcattgcacaaatcttttacctccttggttattcaggttattcatacacacacacacacgtgtgtgtgtgtgtgtgtgtgtgtgtgtgtgtgtgtgtgtgtgtgtgtatctatgcattgtgaacggcgttatttccacaatgtttttcttggtatgtttgctgttggtatatgggaaggttactgatctttgtgtattagttttgtaccctgtcactttatgcatttatcagatgtagacatttttctggtggagtctttggggtcttttatgatagaattgtatcatttgcaaataagaacactttaactttttcctttcccttttaaaaatctctttaaactctatctcttggcttattgctctaggtaagacttcacatggtgtaatttacaataatggagggagccttgtcttattctttactttagtggacatgattctgttctttttttaaatgatacttcggttactatgatacccaaaccagacaaaaacactttacaaaatagattaataggtcaatttctctgataacatagatgtaatattctcaataaatttctttcaaactgaattcaagaacacatcaaaaattatctaccatgttcagattaatttaatcctagagatgcagagatggctcagcatacacaaatcaatagatgtaatttgtcacataaatggactcaaagatacaaaccacatggatatctcattagatacagaatttttctctacttaggatgatgttggccatgggcttcttgtatattgccttgttgtgttgataaagaatcctctgtaaccctaattctctaggacttttatcatgaagggatgttgcattttgtcaaagaccttttttgcatctaatgagatgatcatgtgatttctgtgcattagttcatttaagctctggattacatttattgatttctgtatgctgaaccatccctgaatctttgggatgaagctgaacttgatcctggtggaagatacctttagtgtgtacttgaatttaagttgcaaaagtattttattgagaatttttatatctatgttcatcagggaaattggtctgtaattttcattttttgttgtatctttatctgatttaggtattagcataatgctagtttcttttttatttaatttttacaaaattataatttcacatgtcaatcccttctccctctccccctgctccccaacccccagtctctcaccttctctcctccactccccatggagggtagggccctccacagggactccccaaattccacaacatctttctgggctgggcctaggccctcccccatgtgtccaggccaagagagcatcccttcacatgggatgggctctcaaagtcccttcttacaccagggaaaaatactgatctactaccaggggctctatatggtgccaaggcctcctcattgacatccactttcaggggttaggatcagtcctgtgatggcctcccagacagcagtctggggtccatgtgctcccccttgttcaggtcagctgtttctgtgggattcaccagcctggtcctgacccctttgatcttcatttcttcctctttgcaacggggttccagcattcagttcagtgtataactgtgggtgtctgcctctgcttccatcagccactggatgagggctctaggatggcatataaagtagtcatcagtctcattataggggaaggacatttagggtagcctctccaccattgcctagattgtcagttggtgttatccttgtagatctctggaaatctccctagtgccagatctctcttcagacctataatggctccctctgttatgatatctctcatcctgctctcctctattcttcccccaactcaacctttctgctcctccatttcctcctctcacctcctcttctcctcacattctgccagctccctctcccctacccctattctcccaattagcttaggagatcctggcccttcccattctccagggaccatgcatttttctcttagtcttcttgtttcctagttcctttggtgaagaggattgtagactggcaatactttgttctatgtctaaaattcatatatgagtgagtacataccatgtttgtctttttgtgagtgggttacctcactcaggatggtttcttctagttccatccatttgcctgtgaatttcaagatcctgttgcttttttctactgagtagtactccattgtgtaaatgtaccacattttctctatctatccttcagttgaggggcatctaggttgcttccaggttctgactattgtaaacaatgctgctatgaacatggttgaacatatgtccttgttgtatgaatgtgcattctttgggtatatgcccaagagaggaattgctgaatcttgaggtagactaattcccattttcctgagcaaccaccatactgatttccagagtggtcttacaagtttgcactcccatcagcaatgtaggagtgttcctctttctccacatcctctccagcatagattgtcagtggtgtttttgatttcagccattctggccggtgtgagatggtatctcagagttgttttgagttgcatttctctgatggctaaggattttgaccactttcttaaatgtctttcagccattttatattcttctgttgagaattctctatttagttctgtgccccactttttaatttcattgattggtgttttggtggctagcttcttgagttcattgtatattttggaaatcagccctctgtcagatgtggagttggtgaagatcttttcccattctgtgggctgtcattttgtcttactgtgtcctttgccttacagaagcttctcagtttcaggaggtcccatttattaattgtagatctcaatgtctgtgctactggtgttatgttcaggaagtggtctcttgtaccgatacgttcaaggctatctcccactttctcttctagaagattcagtgtggctcaatttatgttgagatctttgatagatttgtacttaagttttgtgcatggtgacagatatggatctatcttcagtcctctacatgttcgaatccagttgtgccagcaccatttgttgaagatgctatcttttttccattgtatagatttagcatctttgccaaaaataaggcgttcataggtgtgggggttaatatcagggttttcaattcgattccattggtctatctatttttgtatcaataccaggctgttttcagaactatggctctataatagagcttgaagtctggtgatgcctccagaagaccctttattgtacagagttgttttggctatcctggattttttgtttttccatataaagttgagtattgttctttcaaggtctgtttagaactgtgttgggattttgatggggattgcattgaatctatagattgcttttggcaagattgccatttttactatgttgattctacctattcaagagcatgggagatctttccattttctggtatcttctttaatttctttctttaaagactcaaagttcttgctgtacaggtctttcacttttttggttagtgttaccccaagatattttatgttgcttgtggatattgtgaagggtgatgtttctctgatttctttcttattctgtttatcatctgtatatagtagggctactgattttttgagttaattttgtatcctgctactttgttgaaggtgtttatcagctgtaggagttccctggtagagtttttttgggtcacttatgtagactatcatatcatctgcaaatagtgaaagtttgacttcttcctttccaatttgtatccccttggtctacgtttgttgtcttattgctctagctaggacttcaagtacaatattgaagagatatggagagagtggacagccttgtcttgttcctgattttagaggaattgctttgagtttctctccatttagtttgctgttggctgttggtttgctatatattgcttttattgtatttagatatggtcctgttattcctgttctctccaagatctttatcatgaagggatgctgggttttgtcaaaggctttttcagcatctagtgagataaccatgtgggttttctttttcagtttatttatatggtggattacattgatggattttcgtatgttgaaccatcattgtatccctgggatgaagcctacttgatcatgttgaatgatttttctgatgtgttcttggattcgatttgccaatattttgttgagtatttttgcatcaatgttcatgagggatattggtttgtagttttcttttttagttgtatctttgtgtggctagggtatcaaaggaattgtagccttgtaaaaagagtttggcaatgtccctcctgcttctattgtgtggaacaatttgaggagtactggtattagctcttgtttgaatttctggtagaattctgcagtgaagccatctggccctgttttttttttttttttttttttttttttttttttttgtttgggagacttttgatgactgcttcgatttcattagggtttataggtctgtttaaattgcttatgtattcttgatttaattttggtaagtgatatctatccagaaaaatatacatttcctttggatttttaaattttgtggagtacaggttttcaagacatgatgattctctggatttcctcagtgtctgttgttatattaccccttccatttctgattttgttaatcagaaatgctctgttaatcaggcatgctctctctctctctgccttttggttagtttggatagaggtttgtctatcttcttgatcttcttaaagaaccaactctttgtttcattgattcttagtaatgttttccttgtttctactttattaatttcagctctcactttgattatttcctttagtatttgtgtactcctccatggtgagtttgcctctgtttgttctaaagctttcagttgttctgtcaattctctattgtgactattctccagtttcttcatgtgggcactagtgctatgaactttcctcttagcactgctttcagagtgtcccataagtttgggtatgttgtgtctacattctcattaaattctagaaagtctttaatttcattttttatttcttcctcaacccaggaatggtgcaattgggttttattcaatttccaagagtttgtaggttttctgcaatttgtgttgctgttgaattctaatcttaaagcatggtggtctgataagatacagggggttgtttcaattttttgtatctgtggaggtttgctatgttgccaagtttgtggtcaattttagagaaggttctatgtggtgctgagaaggtatattcttttgtgtttggatggaacgttctataatatctgtttatcacaattgtgtcataacttctgtttgattctttgtttctttgttaattttctgtctggtggtcctgtctagtggtgaaaggggggtgttgaagtctcctatcataagtgtgtgtggttttttgtgtggtttgagctttggtaatgtttcttttacaaatgtaggtgccttcatatttgtggtatagatgtttaggattgagacttcatcttgatgatcttttcctgtgatgagtatgaaatgcccttcttcatctcttttgattgattttagtttaaagtctaatttgttagatattaggattgctacaccagcttgtttcttgggtccatttgattggaaaatcttttcccaaccctttactctgaggtaacgtctgtctttgaagttgaggtttgtttcttgataacagcagaaggatggattctgtctttgtatccattctgttagcctgtatctttttataggcaggttaagaccattgacattgagggatataaatgtccatttattgttggttgtttgtgttggatttattgttggtggtatcattgtgtgtggattttgccctcctgtttctttttctgtttggtaaatttggattatttattgcctatgtttttgtgagtgtagttatcttcgttgggttggagttttccctctaggactttctgtagtgctggatttgtggatacgtattgtttaaatctggttttgtcatggaatatcttgtttttccatctatagtgattgaaagctttgctgggtacagtaatctgggttggcatccatgttcccttagtgtttgtaggacatctattcaggaccttctggctttcaaagtttccattgagaagtcaggtgtgattctgataggtctgcctttatatgtaagttgacatttttcctttgctgctcttaatattttctctttattctgtaagtttggtgttttgaatattatgtggtgaggggagttctttttgtggtccaatctatttggtgttctgcaagcttcttgtactttcataggcatatccttctataggttggggaagttttctatgattctgttgaatatgttttctgtacctttgagctgtatttcttcaccttattcttagattcggccttttcatgttgtcccatatttcctggatattttgtgttagagatttgttggacttgagattttctttggtcgatgactatatatcctctagtgagtcttcaacaactgagattctctcctccatctcttgtattctattggttatactcacatccttggatcctgatagtttatccagcctttgcatttccaacatcccctcattctgtgttttcattattgtttctatttcagctttcatgccttgaactgtttccagtgcttccttcacatgtttggttgttttttctttagattctttaagagaattacatatttcttgaattttttgtttgtttttttcttttatttctttgagagattttcttgtttcctctttaagggtctcgaacatcttcataaagtagatttttaggtctgtctcttcttcttcctctgtgttgtgcttttcagatcttgctggtgtggagtccctagattctggtggtgtcatattggtctttctgttgagtgtgttcttattctgccttcttcccatctcttcttccagtgggtgcaggtgggggtctctgtatctcctcttgtcacccggtggtgtgtgtgggcttcaatatctgcagttatggatggtcttgcctctcctcgtagtctcctcactcaagagaggtcagggcagtagagggggaaggaagagtgaggtatttccagactcaaggaggttctccctgtctggactggtccactctattcaggtgggtccactctatgcagacacaggcccagagagatcctggggtgattggagccttgggcaggagtagggttcaggagaggtccaatgctagtttcttataaagagtttggaaacagtgttttcttttatatttagtggaataatttgagaagcattggttttagttcttctctaaagttctggaagagttctgtggtaaatccatctgggcctgggatatatttttttatctcttttcggtctggaggcttataataattgctttatgaatgcatgattgcctacttgtatgtatgtgtgtgtattatgtatgtatgtatgtgtgtatatatgtgtgtatgtgtgtatatatgtgtgtatgtatgtatgtacgtgtaccacatgcttatcttctacccatggaacccataaaatactgtcagattccctggacagttgttagctgccatatggggtctaggaactgaacatagctcccatgaaagaagagtaaagctcttaacagcaagcacctcccagcccctgcttggggtttttaaaaattgtggtttcaatcttgttcttttgaggaatctgtttaagttcattttttatagcttcttggtttaactttggtaggccatatgaactaagaaactgatctatttcttcttaggttttccactttggtgaaatatagatttttaatgcatgtccttatgatcatctgagttcattggtatctgttgcaataaattctttaaaatctctaattttattctttttatcttctctttcttttggttcatttgggtgaagatgtatcaatcttgtttatcttttcaaagaatcaactcttggcttcattgattcattgtgctgttattttaatttctgtttctttcatttcttttctgatcttgattatttatctcatctatcatttgtgttgctggtgctttaagacagaaatcatgcatagtactgctaactgggccaaaactctagctggctagattcaaggccccagggaagacactaatactgtgattcttccatatggacatagcatttttgcatatataccctttaattaatgcatctctcagccagtcttcttcagaggaacttctttttgcagtagatggtaattaacatggagacctacaactgggttataaaagaggatatgagactgtaaatgtccagctctaaatgggtcatctatatccacaccctcttcctctaaggctcagggataaccacagaagaaatgaaagggttgttagaaccatggagagtagatgtctatacatctatatatggtcaaacagtagtcactagactcaacaaggccattgcacacatgaattcacagtgactgtgactgcatccataagacatgcacaatatcatgccagacagaatcccagcatggcaaggagggtcacttgacttcccacccctggttaaggatttttgtcaattgatggcaactggggaagagtcagttttcttcagggatgcagtcacttagcagagaaatatgcttcggtatatgatcctattcccatgcacacaggcttcatgaagtggactcaggggctttaaaaagtgtaagtgaagttggcagggaaaatcgtgacgaggaaaggggaggagttggaggagacggtatgggtgcagatttgctcaaaagatattatacacatgtaggaaattctcaaacaatacagtttaaaaggagatatctggtggcttacaggttttccaaaggacaggactgattagtgtaacatggtatgagcctctgtgcaactgtctgtagattattccctaagctagagtgactttccactggtgcttcccgaacacattcccatctttaatgagaagtccagtgattgattctgtaagtgaggatgatgcttgttgggactctctgtgacatggatgaggtacagtcaaccaaccataggaactactgtttcaatttctgaatatacagacaacttctgtgtatttgatactgattatagtgatttttcttcttccatatctattgtgttattccagaattatcttcagattgtttgtgttttagacatcagaatacaggactattgtgagattagacaaaggtagtattttgtgcacaactatgaaaatgtggttagtcaaggcataggctgaagttcagctctgttaaatccctttctgggaatctctataaaatatacaacttacctgtatagggttgtcctggtcacatataagtccaaacagcctaccctggatggtacttcaatttcaaagatgtctgcaaagatcaagagaggcaggctttctggtggccactccagttctactgaaattacaattctgctttgtcatttgctgaatcttctaatatgcagaaatatgctttttttaccatagcatagcattttatatatgggtagcctatattttaatgaagctccattgattttattccctcattgatcataggaaaacatccaaattactttacatgccacacagttactctagggttggccactgcgtgaccacctctgttctccactgatctccaatcgaatggacccttctgcaattccaaacctttgaatagttcaggtttctatcacttgaaattgaaaatgctgtctagtcttttccatttaccctgagaaatgtatttacctctgtagtggtttgaataagctcatctattggaatgcttagggagtagcactatttgatataggcgtgtcttcattggactaggtctggccttgttggaagaagtgtatcattggggatgggctttgaggtttcaagggcccaagcaagccctagtgtctttctcttcttcctggctttggatctgtatgtagaattctcagctgccatgtctgccaagctccctgccatgagaaaaatgaactaaacctctgaaactgtaagcaagccccaattaaatgctttcttttgcaagagttgccatggtcatgacatctcttcatagaaatagaacattgactaagacagcctcctactcagagcaagagatgtctttgccattggaagcaatcctaactgaagcccacggagttgattcatctctgtgccccctccctttgtacatcgactgtgaatcatactacatttgcttagtgatttctaaccaaattattttcttccagaacagcctttgtcttacatttacaatgcttaatacttgccttaccttggggtgctgcgtgattgtcaacagaatggatcagtaaggtccagttcctgcttttttcaacttcctttttagtggcttccttctcctcagtctcccgttttatgtatcagcaatgtctgttcttcaaaggcagagacgaccgtatgaaagtttgatctactcagagatgatcacagtgatctattcatccctcactgtgttcacccaggactggccacacaccaggcactgacaaaaactcaggccaattaaagcagcaccagttcttgccatcaggagcatttactgtaggaacctgactttcattagtggttccatagacaagtgtaacctctttctctaaaggagaatgtggctagtagggtgagagaggcaagggagtggaaacacacacacagcatcctacaggcaagggctgcttagcacaattgggaaaagtctcagcacctaactttttgcatctatggcaattgttagctaccataataataataataatattttctagaggaatatataatgaatcccataacttgtaatcccttgcatctaatcttgttcacatcgactttgttaagaatcctagaaaggcacactgcattgaaaagtacagggagaagaaaaatttagaggttatttctctgatttcttttctctttcgaaaatgcatttgagactcttgaagtttggattacagtttaaaaaatctcactatgtaaagcatggctctttctccaatccttacccctctttattggcacaaggacccagatggtagtgtttgtctgtagcctaagtgcttcaagcaaatcaatatatttatgcagcaagtcttaactccctagcttgggatacacatacaatagcagaaacctcactgataaaaacctgcttctgaagtcactaactgctacctaaatatacttgtgatattttgtttcaagcatcattgagttgagctatgatggtgaaaatgtgcataacctatttctctggaactgctctttatgaggcatattgattttgtcagagaccacatacaactggcaacatttccttcaatgatcattttggtagcaattgtgttaaaatagcatccaaaggacaaagaaaggaaaaagagcaattttgtggagctcttttattgagtgcctgctttatacatactatttggtaaaggtaaagctgtgtgtgtgtgtgtgtgtgtgtgtgtgtgtgtagagagagagagagagagagagagagagagagagagagagagatttcatgagtattgcccatggaagtagatctttgaagacattactctctgaatatatttggaccatgaaacaatatttccttttatctctctttgtcattgttaattggtataaattgccagatttcccagtggcagcgtgtctaatttaataacctgagaggctagtgcttgaaaatataatgaaatgtactaatacggtggcagtttcataattactgatataaaacatattgtaatgaatctactgattagaatgacttacaaagtgcgaaattcagtatgatgagaacttcagctatatttgagtaaatcattgtggccatcaatcataaaaatttaagtattggctggtgggcagtactttgatttgaaatatatatatttggaaaaatgtgatatcagctaataacttgatgaggtttattcatgacttctgcagaaaatgcacagaaactcatttactggaagtctctcaatctttttgcatggacatgttcctttcattcagtttttcctagcagcctgatcccaccctaaaaagcttggtgattttgatatgttgttattttgtaaatatggctggagccaacatttctataatgtttgaaagattcatgctcttctaatattttctccctttttattacattatttattttgtgtgtgagtgttagtccatgtgtgtgtgtgtgagggcggcctatgtcatagtgtttgtgtagagttcagaggacaacttacagaagttaactctctccttccaccatgtgggtcttggggattgaattcaggtcattagacttagtgacagatgcctttatgccctgagatatctcactagcctagtattttatttatttaaagaaaatatgtagagccttaagatggctcagagggtaaagctatttgccacaacatgttgtgatataaattcaatccctattgacctctgacctccacatgtctaccatgtacacacacacacacacacacacacagagagagagagagagagagagagagagagagagagagagagagaccacgcacacacaaaataaataagtttagaatgaatggaggaggcagtgtggagaagtagttttccttgtgtgaaatctcagttttatctagttgtcagacctcagagaaatatgaaattcagcaggtgatttaaccttagaatctcattttctttatctgagaactcaactttgtttactctgagaatgaagtaagaagccaccgaaagagaatcacctgtccaccatggccatcaaatgtgtagctctcttcctcacttttcctcttggcatgggattcgcaacatgtgaacaccatgcgcagatgacgcagatgactaacgtactgaggctgaggatcacgtttaagtgtctttgattttggaggaaggacaagtaggccatggactttggtcatggttcagcatggtgactcagaagttggatgcctgtctgacctatctgaatttgaatgcaggctcttctccagatgagttcgtgacactggggagatgatgtaatctttcttttatgctctgtaaaatagagatgagagttttgcttctcagggcatagatggcaaagttcaattagttgaggaagagtagggtagcttcctgcaatgaggtccttatttttttcctgtgtccttttatactctagatacattcccttagaatttacaacccccaatgaggccctttatttaattttttgttttgttttgttttgttttgttttttcgagacagggtttctctgtgtagctttggaacctgtcctggaactaactcttgtagatcaggctggtctcgaactcacagagatccacctgcctctgcctcccaagtgctgggattaaaggcatgttgcactgcccggcccttcatttcattgtttgtgacagtcaggtttccattactttcacgaaatactggagaaaatcaatgtaaaagaaggaaaatgttcttttggccttagagatttccttcggtgtgattagacggtcctgctgctcttgggcctctggggaggtggaactgtccggcataagcaggagatgaagcagaggtatacatttcactgtgggggttgggaaacaataaggaaggaaaaggggccagggtcctgatcgaaaggtctagtgatccaacttcctcctattaggcccaaccttagacatctgacatctctcagtagtgctacaggctcttcaacagattgcaaatttgataggcatcaagctccaaaccacagcaccaacctatcctgattccactgttagtgcctgcacttaagacaaaatatgatttaaaaaagcatcaggtgcttttataaatagttcacaaacaacataatgaaaagattttgattctagtctaagtcccttctagatttgggatctgaaaattgcaggaagtataaaattaaaatgaggttatttatgaaaattcagtctgcaactctgatagctcagcaaagaacaaggatcttatagcatcaacacactcagggtcctttgctatgccttccttgggaaagttggtgggtcagtctttcactggttttgtgaagtaagtgaaactctgccatggatttgccagaagagagcccttttcggctcctttgttaagagttctaagttggctggacgtagttgcatggggtgtgattttgatttttggaggatcgtttgactaagagatagctttaatgcagctgtgtttctaatgtaaggacttgggaacattatgaaacttgtcagttctcatggtttcatgcatccacctcccattttcctattagcattttaaaaattgtgttactcatttgacctccaatcatttaaagcatattatcctggctgacccttcaagctgcttgttagggagcagcgcccctgggttctgccgtcatctcctctagttgcctgggtgctcccttggcaatttgctagcaatttaaaatgtttttgtagggtttctggattggagctagctctctgcttgttttgaaaagatactggttggcattggaatagtttgtttaggatgttctccacactaaagagagacacgaagtacctggttggatggcatagcctggtctttatgcccacactgctgtgctgtgattatgaaagtacacattggtaatgtgctaaaacatacacatatttttttaaaaaaagtaagaatcatagcaacttcatggcaagggtatcatcattatcatcatcattgaaaagtgaaataactcatcaagctataatttcataagctctatatgatctataagctctatatgatcaaactataatctcataagctaatttctatggattagtaatctttggctaactcccacttggtagatttaaaaacaaattacacagcagtatatgttcagatataagcatacttaggatctaatacaccatatttatacaatgagactgtatggcttttattaaattactttacactccagtagaatgtcatggctatctcgtgacatgtggctatcattttgtgatatctttgggcttggggctggcttccgtgtgggttattgctgatgcatctatctgtgtgcagtggctgtgtgcctgactcagagccctttgctatgaaatgtgtgcccactgctggctattaagaatgttttgtgattctatcctaaagaatagtccctttcttttctttgttccacctgaaagcttctgagaagcctgaagtctttatttcttcccaggagtactttgcagaccaacactgagaaaaaaggattcattagacattgttttccagctttccaaccaggaggtaaagagaaaaggcaagttcaagtgatgtcaagtatcaatgctggtttgattttcatcccagcacaattactactttcataataccgccggtatttaacatccccttgactctcaactctatgcagtagttaagagaggcaggtattcatagggagacagggaaatagcacagcataaaagcattgtagttgacgatgccgagttcacctgtgctctccaaggacatcttcctgtttatcctcttttgacctcattgcttctttcaaacaacatcaaatctttatcatacagaagaaaaggtgtaaatcacaaataaatactgacacctctctttatccatgggttctgcatactaaaagtaatcattaaaatgcacctatatcaaacacatatatttatggtactatctctagataacacagtataacacctacattgtaacagataacaatatcacccaagatgatattatagggtgtggggggcattttaataggaaacttcagtatctgtggagcttggtgcacacagggactctcagaacctctgacctgggctgaatggagactgtggcttccactatcttcctcctgctgctgtctggctacagttaatctaggggtttttgtttttgttttgttttgttttcacttttaaaaacatgttacttgctaatcatacatgccaacagcctcaacatttttgacaacactgaattagactcatttgcaacataaagctttctcatcttaagaaactcactgtgtaaacataaaaagaaatgctaaaggtggacaagaccagccagccaggcaattggtacaaacatgatgtgttcctcaatctccctgtttcaatactagaaagttcatcaactaagatgattttttacttatcattgcacaactgttctatgatttaaaaaatcccatccctgagagcttcccctgcctgccaccagctgcaacactcaggagagcaggccctgtacctcccatggggagcacaatagagccaaccccattggaagaggtatgagtgagccagaagagttggaagacattttcacgcatatgcatctgattccttgacctccacatacttctttacacacaaaaaaaatttgatagaacaaaccacaataatacacatgctatgtgaaatcagatacacagtctgttgctgaggtatcattcactcccattgatgagcctatcagttacggtttgaagcaggttttagtatcagcatcagcagcaatggattttcctgagcatggaagaactgtccccattactcacctgtcatgtggtggcatgggtggaagagaaatgctgccccccacacctgcccagcaaccccagaggcaggtggaagagctggccctgaggtcggtcataaaagcaggaaagctagccctgcccctcatctgctgcagtactcaggaaagtggcccctctgccacacctgggcaacacagtagagctggccctggaggtgcagatgtgggagatctgaccctgaggacatgaaggaaggtaaactgccccctcaccttgcccattgctgtaaaaaggtgaacttgccaaggcaatgcaggagagctcaccctggtggtgaggacaagggacaataggcaggctgaccaactctgcaactacccaggcccagaaccagaattatgggttggcccactccaatattcacaccatctgtgatctgctggagaatgtgaagagatcagttctgtagacccacagctgtaggatctccaaaacacagggcaacaacagaataaccaagaggagtttcagtgagggcccagcatcaatagagtagaaaaaccaccaatgactctttgcaatgaatactttgcaagtaaagatatatggacacaagggtttactgtgtgactcactatatcacaccacagcttccatgatgagatcccttttttctttttctttttttttctcttaaattttatctaggggaggggttacaagggcagagggcatataagcagggacaggaaatgaatcagatcaagatgcatgatgtggatgacacaaagaataaatgaaaagaagtttttattttaaatcccagccccatttaactgcagttctaaaaatctccatggtagtttagcttagggtccagattcaaactaatatacaaaaatgaataatggtgcaaaaatatgaacaaaaacatactggagcttgtggtggagtaattctgcttaagttcttactgaaatgtttaagtatagcttgacaaatatctggatatttacaaaaagaaattctaaaactttactgaaagcctaaagccctcgagaaacaatatgctagtgtcctactgggaaaatccattgctgctgatgctgatactataacctgcttcaaactgtaactgataggctcatcaatgggagtgaatggataccttagcaacagactgtgtatctgatttcacatagcatgtgtattattgtggtttgctctattgtatttttgtgtacagaagtatgtggaggtcaaggaatcagatgcataagcatgaaaccctcaaatatgcagtgttttgcagcttgctcttttcccttcatagttgcaatgtggggctaatgattcttatcttgttgaatagctctgtgtttaattatacatggcatgaaggcaatacatggaagggttcgtcttatttcatcttcaaagacttgggaaattagtattagtatctcaagtatttaatgacacacttaagatttgaaaatatattaactctgttatataattgccaggcctaaagaaaatgttgtgtaactcttataaatataagagaattaatgtaataattgccctgtgtccacaatccaccctaccttggttgtaatgaattctgtcatcctatcctgggtttggactcatcttagcaatactgccagtatgcctctactatggttcagtgcagaatggtgtcagttgtttgtttaattgctaaatatgcattcccaggcgggttagttataaaagcaaaatgtatctggtacagagttagaagaaggaggaggaagagaaggaaaaggatgaggggggaagaggaggaggagaagaagaaacataaaaaccatagaaagtcacaagaagaaatttagaatatttgaatgaaggtaatcatcattgacgttttgttgtccttctacattctccttgtcactcaggtacacatttgagcttcagaagtgctgctaagtagcactagtaaaattttaacaaagagcttagccgaatttaattttcagaagtatgtcaaagatgtataggcaagaacagataatgggaattgcttttcaaagttttgaaaagaaattcaaatacttgcccctgctgtgtattaaatagagaaagggacacacacacacacacacacacacacacacacacacacacacacagagagagagagagagagagagagagagagagagagagagagagagagagagagagagagtaaagaaagcaaacaggaatctggaccaggctataaacccccaaaacctagccccctcctcccagtggtgcacttcttccatcaaggctatgccgcataaaggttccccaatagcaccaccaactggggtcaaaatgtttcaatacttgaaactgtggaagacatttcttattcaaatcacaccacatgctttgctatattttgaaggggcaataccagcttttagtcttattgagaccttagggatacagctaaaagacgttccttgcaggaaatccattttagaaaggtgacttttatttcattattcctagttttctcatgttgagatttcatatgcttgggacaattccttacccatacagaacatagaaaaatggtttgatgtgggaaagttgtcatattttgtagagagtttgtagaatttttttcagggtccttagattcccaagctagcttgccacatttcctgtgtttcgtttctcttttatatacagtagaaactcacaaatatcctctttgtgcttcagtttaatgcagaatgtttgtggcttcccaattcagggtaacagggttgtgtagctccttaactcttaccaagtaactggaaaagcatgcaaagttactgacactctgcaggtggattgtgctgagataactcaagaatcttctggaagaagaattggtcctctggaaagctctgataatcttgtttgattgattgattgattgcaccatgtcacctgcatgtgatggaagatctattatgaacagtgatatctgtctcatcacctcacaattgcaattcttggtgtgtgatatgcagatgatattcagctattccagcaatgctggaaaattctagaaataattctcaaggtaaaaattaaccatgacttacaatgaataagaatgtcaggttgcttctaggaaaatgatggaggaggaggatgcaattagtgttaaagaataatcagtgatcagataatcatcactaatgaagctaacacagagacatccccggtgtctgttgtgtggaaatgcactttctctgtgaacgtaagacttacacaagactgtcttctttcttcttctccagctatcaatgagagggttcgattgctaatcatgcttttgtctatttttaaagtataagaatgtgctgtgcagacaggaatactttttcttcttcacactcttgcagtatgctttattgatgcaccgatctcgcctttctctaaatggccattatgttgtaagactcagttgcaacgttaggactctgctacaagcagtcagtgcatgctgcatcccttactgtttttccaattagatatcgatgcatattgaggaaatctgacagctacacctgactgaaagaactgggtgtgtttatttgaaaaataaccagttgtaaaaggatataggtagatataattttaatttttaaattttattttacttttaattaaaatataattacataatttctccctctccttctaccccctctaacccctctcacgtctttttttcaaactcatggcctctttatctttaaatatatgttaaattttatatatatatatatatatatatatatatatatatatataaaactaattctccttctcttaggtgttagcaggtcaactggtattgtcattgtttagatcattgttaggaagcatattattgagatttcatggatgtagatccagccacttctagaagacccaatcatactgcagatgcctctggcttttacagtctttccaaccccttgtccatgatgttctctgaaatgtaggtgtaggagttgggtcgtagatgaggagtgaaagttacatatatctgtgagtaaaagtatttagaataaagttagaaattaatgctagtttaggaaagggtcaacagtaggttttcttctgagatctatgacctcagtgaccacaggtaattgactaggtttgcagtaccaagtatgttttccctcctgttggacactgttgtgagtccttctctgtcctgccagctagctcccacatcttgacatgaagacttattattaattatgagagctcagccaatagcttaggcttgttcctaactagctcttataacttaaatcaactcatttctattaattgactttctgcctcatggctttattacctcatctccatagtgcccattctgcttgctctgtgccccctggcatctctaccttcttcttcccattatcctctcttcccccaaaatccttcatagtgattgtgaccatttagctttttattaaaccaatcagagtgacacatcttcacagtgtacaaaaagattgttccattacaggatacattaggagtcctctgaccaacaagtcaggaggtttctcatgcctggtcctaggggtctttttaggtagtctatggctcttcggggagtattatcacccaggtgatgtaatttcatttaaatttgtgtgtgtgtgtgtgtgtgtgtgtgtgtgtgtgtgtgtgtgtttgtgtgtgtgtgtgtgtactattttatatttaagtaaatataaaataatactatgtgggtacactattttatatttaggaaaatgtaaaataataatgttcccatagattttttgaataaatagattttttgagaaagggtttctctgtgtagcactggctgtcctagaactcaaagatatctgcttgcttctgcctcctgagtgctgggattaaaggtacacaccaccatctcccagcaaatgaatagatttttaaggagaataaatgccgtcacttgtgtatacaatttatgctgtaattcatttgttaacaagagtctgactctaagttttcactatgaaaaagatgtatcttgcttccaaaatctatagaaactcacttgtgtgtgctggaaatggaaacatttccaggggagtttgtgacattctgtataatgaggaagaatcaactaagggcgacaaggatttgataacccatgacaatgtgtgagtttctacctttgctgtttctaattttgcatcacagtgggtgggacttgaataatattagcaaatgtcctcttacaactagtgggacttttaaatgattctccaatgtcaataagcttgttccagctacatggtataaagtgactcatgcactcatattagaaagctggccacaaggcaaagatccctacaactcctaagtctgaattttttgtgaacagcactgctggaatatttgtatgatttttatcttgtactttcaaggtttggacaggtctcctaagaggaaagagtaccagttatactcctgttttataaaaagaaaactggttactctgccagcagtataaccaagagtgaattgtataaggattacatgatgaaattatgctttcatttccccacttggtagttactattacaatgactcagttgattttttgtttcattttttattattgaaaaaaattcatataatatattttgatcaatccccccacaactcctcccagatctccctatctcccactaaaccaaatccatgcccttctgtctctctttttacaaagcaaacacgcaaagaaacaaagcacaagaaacacccacactgctcagctcatcaatacagtctgactgagattaaattgctagaatccttggtaaaatcttggcatctggagctcttttggcagctgagcaagaccttaagaacagcaggcagcagaagtgttagttggaattgaaccttcacacagtcaccagcaatcagtccacctataacctcagacatttctaaaacacagattttcaatgaaattcagagtgggagggggagagcaggggtagcctgagctgttttgcagtggagctgcctctgtgaactgggaattctgggactcatccaagttcatggtggctttgctgcctttccagggtcctttctagaagagctccattctccatcaaatgtgtttctttacatccaagactgatgtttctctcatctgctggtactcatccgtgcaaataattacctacaatggtttgttgaaaatgttacagaattgagtatccatgacagttacttatgtataccaaatacaaaactcatatagaaacacacacacacacacacacacacacacacacacacactgagagagagagagagagagagagagagagagagagagagaaagaactgtgtgacagttcaacagaaataagcaaaaaatgctaatagtaaacacttctccattaatatgttatttatgttccaattggttaagctatcctatctaaaaacatctagtggtagaagggacataagcagtacataaaacaaaacatacaacaaagcaagaccccaataatacatagttaagaaattgaccttaactgttccagaccccctgaaggaggaagtcagtttgggtgtctggacaatctatggggccactggtagtggatcagtatttacccctagtatacaaatggactttgggagccctctccacataagagagggatactctcttagcctagacacactggggagggcctaggccctgctccaaatgatatgacagactttaaggatcccccatggaaggcttcaccctccctggggagcagaaaagggttgggatagggagtcagtgggggtcaggggaggaggggagggacagggaactgtgattgacatgtaaaagaagcttgcttctattttaaataaaaaagaaagaaattgaccttagaggatagggggccaggaggagggatggaaagaaaacataatgacatatgtttgagaaatgatattaaaaaatcaaaagaaactaactttgatgtaaggacacatacagacttacagtgaaaggaagggaaaaaatatcctgtatgagtagggacagaagcatagtagagatgcagtatcagagatttaaagcaggaaacattccagagacaacaaagactgttttctggtgaaacaaggtcagtgcaccaggtaaacagaagcattataagtgcatatgcctctaatactaaatgaagaaagaaaggaagaaaggaagaaaacatgaacggaactgaagggatcataagacagccctgacttcagcagcagtgttcctggatgttcaaacgttccaggcaacatctgcaagaagcatggtcttttgagggacacaccagtgtctcttagacacctcaaaacattggaacagacaaagaacagcctcccacacaggaatgttactttatctgtgctgtaaaattgggaaaccattgatcgattctttcacttgaacccctgtcccttcgaggtaagcacttgaacccagggcgtcgtgcatgctaggaagcactccatcagtgagctaccctccaagccccttaacttgattttaaagatacaatttttagatcgtttcttcttaagtagcaaagaaaaagataaaataaatggtttgtattaccatcacgaaggactagagttaattgacagctggacctctaggtatctaattaccatcagactctactatggctgcaatcaattactccttagccaaggcgattatttttagcagagacactatactgtttaattggctcctatttcataagtttataaaggtcaagccaaggactgcagaagagttaattttacaactaaagcatattagagtgtttgatgggaagttatattcctcacagttcaaaacagttgatagcatctgttttgaaaagtatccagtggaatcaatcctcacctaactctctggaaaaaaaaatatggggccttgtctactttctacgtgaagtcagacaccgaactaaacctctgtgtacatctgtaatgcctgtcccctctgtttgcatctatctgctctgcccatttcctctgtgtacatctgttctgcccctgatccatcaacttcactttgttggtctgctgtctaatgcatattttccctcttctcaccaggaaaataaaatgtgcattctaatatctttaagggaaaaatccaaaacagtatacttccagggtttatagcacttaacaatgtaaaacaatacacacagtgacagggacctaaaatagctggtcctctgttccagacagataaaacttcatctgggataaagctgggttatttacaattgtaaggcattattccgagttctggggtaacagattcttttttttttaattagtttgtcttgaaatcttaaatttcagctgaaagatgctaagtaacaatctgtataagttttctttgatggtttctgtgtcattgtgagaaatcttgttcacctcattgctctctgttctcttcatgaaaattcaaaggataatctatgaatttctgctttccgtgggtaactggtacatatttatcttcaagctactgtgtgccagcatctgattatgtttatctgttttatgtatctagcctatctaccaaagaaatctaatgcaaatcgattgcccatttctaggaaatatacaaaggcacaataccatgtaagatgcaattttgtgtacttggtttggcttgaagcagagccacatagccaactaataaaaagagtggggagcccgggtcactggctggtgtttctacttgctaactgtatgactttggatgaattaatagttcagttacttgatctttctaggagaaagattagtaggctctttgtgtgtgtgagtgtgtgcacctcatttaaaatagacatgtatagttctttatagagtagattcttcctcctcccgtcccgccctccctctctcttccttcccttcttccttccctactcccgctcatcacttaccacttatctctcccttcatccttttctctctccctctcgtctccctttctctcctctcttctctcccctcctccccatccaccttcctatatcctatctctttaccttttcctgattctgtaaactactttttccaaaactatagattttatcttttatgatgctttttccagaacattccctaatgtctgacttatgttctggcatacagtaaatttctgtccttaagatttttctttttattgaagtatctgaaaaaattttaaaatgctgtagtatctagtacttgcatgctaattttacatataaaatatttaaaataaaaatatggaagaaagtactaaaatctgtccaaagttttaaaaaatggcgaaaccctaaagataaaagatggaaaagggagaattccctctcttttttcttgttctttgacataagggtttagagtgagaagagagggtgatgatgaccatcaggcaacagcccccagctgactccaagaggcaggcagggagttttgagtatcctcagccatagaactgtgagaaagaatggcatggcatcttgcttatactatatatctgtgagtactactttttctgtgttatgtcaaagaataacgttgttaagaagacgtgtttacacatagaaactgttcccctgtgcatatgagcaccttaaaataaaacagacataagcatttgaaaagttttaatcgaggtaaaaaatatactttgaagattattttgcaggctagagagaagatgattttttaaaaccaactaggtttcaaactacttctttcaaccttgccttcgatcagtagttaagatacagactgggtatccttatgggcatgggaagatgtcagagaatattagcatagctatgctaaaaatatacatatcatgcttattctaaattaatatgccttgaatgtgaaataattatgaaaaccccaaatcctcacattttaaaaataacaccatttcacttaaattcctattagtccataaaaaaacctccttcctcctacatttaaatattagcattttatatcatgagtgaacatccatataaccaatgcctgtattaatcaattttgatcattagtactttgcaatacttttagaaaatcacatcccttcttatgtatccatttccctagtctttcaccaatctacctttttgttcttgttatgcatttcaaagtaagttgtagagggcaaccattgcaaaaacagatttatttttggctctcctgtttatacctagctagcctagactctggggatacaaatatgaaaaaaaaaatctgattcacaaacaagtacctgcctaccagtgcactacattgcctgttagactgactttaattgtgcatctcatcttaaactcaacaccttttgtctaggttattacttatgccataaaaattaaggtagaagcacttgtcatgcctgggctgggaaatggctcagtgagtagaaggcttgctgaagaagcatgcacatctgtgtttggatccccagcatctacacaaaacaccaagtgtggcaggacatgcctacaaccccagccctggaaagcagaggactggaggggcctagggtcagccagtctagtcagtccacaagctctaggttgagaggtcctgtctcaaaaactaggatgggccgtaactgaggaagacacatgtaagggaccactagcctttccaggtgcatgatgggtgtacacacttgctgcaaacaaacacagagtattgtaaaaactgttgctctgctctcacaagtcattgataaaagttgttagtcaattgcagagcactgatctctttgaaatgagagtggaagctgcagctgctggttattgctacagtcacagagcttttagatctaccagaccttttgattctgtcctcagccttgaggaccaaccattctgagtgtagattcaagctcactctctgctagtagttgccagtagaatgctggctacatgtgcttccacactgaatgctggtctgctgtgtttggtgatgagatcttaaagagaagcaaagacccggtttgtcatgaactgtcttattccaaataggccgtctatgttctgatgtcaagtgttaagttattttctgtgagaacaccagtaatttatgaatagagaatgaacaagagtgtccatttgaaagcatttgagggcggggatgttttgttttgtggggttttttttgtgataaaactagaaagtgaaacaaattagagaagttagaaaactagtaactatacttgctactaacattttcaccaagttaaactatatacaaatgtgtactgaaaacttactagaaaaacctagtatgagactgaagaggcaagaggtcccagtgtgagttttgctaaatggagggtatgaaataaagactaggcaaaagtaatttactagagaactgagcttttgtgaaaacagagcaaagcaaaaaacgaatacacaagcaaccaaaacagtgtaataagaaatgagacagagaatacagaaaacctatgggagtttctgaggtggccatggtagaacaccagcctagtgtgcgtgagaccttggatttgactcatccagttctagaggaaaaaggtaaacattcatgatgcaagtgtgtgtggctcagttccctggatgctgtgaaaaattctagtggatgtgtttcagcattttattactgacgacttagaagtgatgctgctgccatcttggccccaaatctatgcatatctacctttggcatgggctgagcacatttctgaatcaaaaactatcctataaagagacacagaggtatgggctaaaaagccatgggaagcatccatcaagctacaggtgctggctaggcatattggggggggggacatcacgtgtttgcagtacatgtatccaggagatgtcttttgtctcaagtttgtgaagaagtacaaattgatttgaaaagccagactcacaaaggagggctatccctgtggctcacaaaggatgagttatttcaacctcactaatgatcaagggcaggaaacattaccaacagtaatatagcattgtgcacatagaagaaccgatgaatgtcaaacaggtgacataacctggtaaatatctgaactgacttaggcactcgcatgctcctgattaggaaaactgtttggcagtttaagcaatcacatacttcatggatgtgtgcatagtttatagaaattcattgagctgtgttcttgggatttctttcttgttatattttgaattagattggaatagaagatgagatgtgttttcagaattttcacttgataatgaaatttttagccgttaaaacctggtggaaaagtattttatcatcatccccctggaaatatgcatggcctgagtcagaaaatggaagaaataaataagtaattcaggaattttgatagacttgtttcccatagagttgatcaattttgtgtgcttacatttcctgtttattttaataattgatttctttgaatctcatgatccagattaagtaatttgatgctgccagtaaaatgaagatagccttccggttcaattttgccttcttttttctttgatcttattttcattatttagctcttcttcaatatttttgttctcccaagaactttctgattgatagccaaggtttttagtgtgatggattttacagtggatggttgaggcagggagggtgttctataggaagagacaaattggctgtagtttgaaggacaaattatgttctttcttggatggaacaatgatcttaattagttctggctgtaggtaatctttgggcctcccttgaagatggtgaccttccaggagcaacaaatgcatctatgcctcagggtaaagcccggatgactctcccattgaggactggagttgcataagagttctataaagatgagctcatttcatatcattaattgtatgctttccatagaaacatttcctgacatttccaagcatgcattttgagttgttttgaagggtctaacatttttaatataggcaaagctctatatagcaagatacaaattcaaagtacttgggagtcggcacttagccaatgtgcacattgaaggctgtgttgcctttgaaatgaaatgtccattgctacccatttgatctccgcaaacctcagtgtagtttgaactgcttgttaaagtgcaatctgctttgtggcctctcgcaccattcattacccttctcaaaacccattctttggaattcccccttttgtttattcctaacagagaaccagatgaatgagcacccaaatcactcatctattaatttatttattcatagcttatcaaatatttattgttatcttactctgtgccaataatagtgcaagctgctgcatataattggaattgggtcatagtcttgggcttctgaaagccccaagtccagtaatagaggccaacaaatgaatactgaaatgaagtgagctaaggtctttagtacaagaacctatcaaggaagttaagtggtgagaaagaattcaccttgacttcctaagccaggaagaacaagggctgagggaggggccatggtcaggagggtggggtggtcaggcatagtttgattatttgcagaggtgactgccttctgttggattttggccaaggagacattcacccgttatggtagtgggcaagccagggtgatagcatggtgtcctgtaggaattaacataatgagaacttgagttgcttgtggtattttggaaagaatggaaaagggcattaagcccagaaacaacagccaataccgtgtgtataaagggctcagaaattgtcattgtcccccgcccccataactcttcatcctacctgtagtctatcaaggcagctactttactaccttttcacagacagagaaatccaagaaccataatttttacagttgccaggatatggtaattggtgataccagtatttaaattcctattcctattaacactttagagaaaaagatcttggaggttctgtgccatgaacttgagctcagctatctatataagagagacctttctgagaccttaacaataaatagggtgtgttagcaatgcactaggatccatggggagggaccaattaggaggccagttcagagcagggagaaaagctctttatttacctgacccttgtctaattccaaaattaacttagttagacttaccatgtacacacacacacacacacacacacaaaaaacatacatacacataaaaagaaacaacaaaacacatacatggagggaatggagagcagaaggaaaggagtgtagggactaaggtggctattagatatgtttctgatgagtttgcatggtatacaggcagacataatggcaaagcttgaagtcggttttccataagcactttttattccagctttaggctagcagcggggctaaagaaagttgaaattaggctcctagataatttctattttgcatccagttaagtgaagagtcaatggtttaactgtcaacttatctagaaatataattgaaatttccttacaaaaattgcaatgataaagaatgttgattccctgaacagttagtcccatgtctttctttattctatgtactcaagcatgcatattttgcttgagggtgatttatgtaatggggtggaggcttagataccttaggtaggtcaatattactgtaaggattaacttttctgactgtactaaggttaatatggtctgataaatgtcttattctattgcatatagcatgaccaaatgaattctaatcttgaaaaatagcaaagtgggtataaccaagtggttaccccagccataactcatgaaaacatagaggaagctaaatttgagcagagttgactcctgatgtaaaatataaatccagaaaccaaactgtctgaaataggtaatgtactatatagaaatgtctgacatacattctttaaagttctctgtgatggcattttttgcacaaccattttcttattaaagtctaccttgattataatgaggaaaaaagaaatatagctacttcaatgctggcatcattttaaaacttggaaaaagaaatagatctaaaatatttttatttatggaaatatactagttgaatctgttgtttagaacccttattttctcctggtagcttgaaaaaaaaatggccagaaaccagctgtctgcacgaaaagtaagtagcttttaacctgtaattattctgggcatctggactgaaaggcaattccaggaagtcaggaggagtcacagaaaccccacatttgcccatttatactctctagaaatgataaatgtatgctgtggttttatgtggattggccgtgctcttcttcctccttttccctcctcctcccaacttgtggggtgcagtgctgatccgagaatctctctctgatttaccacttcatcaaaggaaaaaacatcatcatatgtagatcattctgcatttgccaacacataaccaaaagattgtagctctggaggagcttttaaatgctatttttttttttttttggccccagagagtctactgggagaatatttcacgtaatcattaagtaacaaataatattggtggcattataattattctacacttgggacatttggtcaacttgctaagacacacacacacatgcattctcaagaggtaaacaagcagtcccagatgaatcagatacgagaataaagcaacctcaggccagtcttctgcagaagggaagatatgaaaattcatagttccatggagatatgaaggaatgcttcacttcatctgcacatgttgactgtcagctaacacagaatactctggcttagcaaagcaataaccaagaaaatccaagtccattatcaaaggaaaaacaagaataatttaataggtacttgtgagaaaaatctatgatttaatgtattagatgtaaaggaaaaatgcttgattagctgttgagaatttacttaatggatttaacattcatttatgataaaatattaaatacttttcaattatataacaaatcactacacaatttaaataaatacataatatagtacaattatgttataaacctcaggaattaaactatgtagataccaatataatattaaaagtatgatggaaatgaattgtaattacatgatgtcattgaattgtgtttggttttctattccgttgttttttgtgcttcagcactgtggctcctaatggagggaagcgttcagtagcctcctctgctagttctggttctcattagtgtaaaactcttcatttttaatttgaagaccatcttttagaactgttttaggtttacaaagaattgaatctaagctgcagagacttcctgtatgccagctgccccatacttatacagctcctcttgccatcaaattctcctctagtgtgtttatgaccagtgaacccacaatgacgcatcatcacccaaaatctatagtgcatggtaggtgtgctcttggtagttgtgacaaatgtgtaatgcctgagaatataatgcagagtgtgtttattgccataaaagcctctgggcccccatatcactagtctctagaaagtgcggcggcagcagcagcagcaggttagtgctattattttgcctttccagaatgctgtctagttagagttatgagtaaccctttcaaactgacacctttcacttagtaataagtatttcattttctcctacatttttcaatcctataactcatttttttttgttttaagagctgtataaacgatcccttctctcatgtactgtagtccatttgtccaatcacctaaaaattttcttcattaacctccaaatataaacatctgtatgcacattatgtgtggatgttagctttgaagttctctgcaaatactaagaagtgcaattaatgaagggcatggtgagagtgtttcatttcctgtgacatcattaaacttctgtctaaagtgatgaagcatcttgcacttatgagtagtgaccaagagttcctgttgctccacaggctcacagtctcctgtcaatatcattctaatagaggagtggagaaatctttctccatctcaatttagttttatttcctttctaaaatatttcctttctaaaactccacatagagttcctagataaatatttaatgacattgttggtatatgctttgcttgttgctgttcatctttatgataattctgtgtgtttagataatagtcctttcccaaatatgccattctcaataattttctctagtctgcagcttgtctcttcattctctcgatgggcttttgatcattttatatgaatgaacaaagacaccttctcaagcatatctctatgacctgactctggagaaagggggtacaatgtctatgggagtatgccttgtgactgaagggggatgtatcacgatcaaggggttacgtggtgactaagggggaattcattgtgacgaaaggggataccttgtgacttttagcctataaaagtcaagaaagctgttcaaaatgtatgtaaataatacacatttaaatattattcagtatgtatagatactattattttgtgggaatttttctttctaccagcaacattgctattttcaaaagatttgttctactatgtgagtgtgtgcatgcatgggtgtgtgtgtgtgtgtgtgtgtgtgtgtgtgtgtgtgtctgtctgtctgtctgtctgtctgtctgtctgtaaaggagggtgtgtgtgtgtgtgtgtgtgtgtgagttcagatgcctatagaggctagaagaagtttttggatctataagctggagttacacacattcgtccgttcctgatgtgaataccaaaatccagtctctctggaagagctctttaattactgagtcctgtctccagccctaatattgttattctgaattgttcattttctcattaaattgagttataattgtttgtaaatatgaatttttattttacatattttatcaattaagtctaaatattttaaaaactattaagttattatagcaattctgtgctggttaaaggttagagttagaggcaccggtgataaataaacagatgtgccagtaagttgacagtctgactttgtcacagtcattgacatttgaggtaatacagcaaactttaaaaagtagaaaagaaatcatgattactttaaagtgttagattgttttaaatttagaaaacatgagcctcaactgaaaacaatgctatgtatgataataaagggaccacacagaggcataaattaagatgattgagaagttattgtatgctatgatataaagatatagatgatgatatatgcacctggagacttccaacaatcatgtactatgggttttttgaggggaaacagtgctgcagatggaatggcgtggaaagccttcattagggttggtgtttaaggctgtatttgaatgggaaaaggaggtagtcatgcatgatagaaaaggacatctcacctacaaaactgtgagctaataaactcatgctggtgtatggactgccaagttcctgataatttgtgtagcaagaagggaggcagataccaaagactccaggaaaaaaatagctttcaattaagggtttatattgatttaaaatgatgagtttgtagcaattgttacaaaggaatagaaaagtaatatactgagagtgccaggaaatataccactcaattgagggccctaggagatgttgacttgttcaagtaagccagatttctggtataaaataggaaaagaacttcagataaaggattaggtaatggacgaagagggcattggtgttccagagggtagtcatacctaagagcttttggatgttgggtcagactgatgaataatcaaaaagaattgaaatttcagtgctatgagaagggacaggattaagatgtataaagaggtatattttgagcatgaggcaaatggtctcgcatctgaaagccatgttcatcctaccacctctgatggtgtagtggcaaaaaatatacataaagttctctaggaccactatcattttcttagcatgtaacatgaataataaaaacccagggacaaatattgggacaagatgaagatcagaaaagcaaagcagccaaatgctagagagttctcacctctaccaaggctcagaccaaaaggggcaatgctgtcctcagtgtgattgcagactgactgagttcctgtctcctactctcttatatgcctctctaatgctggtattaaaggtgtgctccaccactgcccagcctttatggctaattagtgtggcttctggaattaaagtattgttctaccactgcctgatctgtatggttgactagtgtgcctagctttgcattctgatcttcaagcaagctttatttgttagatcataaacaaaatgtcaccacattagtatccagtaatttgttaatattttttgagaaggcagtgtagtgggataggaaagaaattatatccctgaaagcaaaaagttgggaattgtccttttcttctagatttcccataggcatgtgattcctgagattcatgtgccctagggtagttatgaatgcagccgacaaaaaaaatcaacaaaaaagataggagtttggtgtgtgtgtttatacaggttttatattttggtagctcaattgtgtggttatcaagtgtcaactttatagattatattgtaatgttataatgtcaaaagggcatataggtagcatggggagagatacagcatactagaaagtttgtggacaccaaatccagtgaagtttataaaacagagaaagtaagttcccaggttttaacacacattctcatgcttctggtgtcacaacctgtcagtctcctctgaaaagccttggtgactgctgttaacatcatgcttaatggagaaaaactgaaagtatttccccaaagaccaagagagaagcaggatgtctgcttttgctcgttccattcagtattatattagagacagcatccaggacagctagataagaagttaaaattgataaggcattgtgttgacaagaagtaaatttatatataaagaaaattctagagagtgcctgtcccaaaccccaaatgatcaaaaagttcagcacattaggttatccctatatactagccacaaggactcgagaagtgattttcaaaacaagttgaaaattattagagtaaagcaatgagacattgcttttctattgctgttataagacaccttgagcaaggcaactaataaaagaaaatggttaatttggactcttgatttcagaggatctagtctaccatggcagagtaaaggcatggaataagaaacagtagataacttacatcttgataaatgttatagaggcaaagaaagagacctcctgggaatggccatgcctttagtatcctcaaagcccacccccagtgacacaccttttctaacaaggccacacctcccaatccttgcaaaacaattccaccaagtggggaccaagtattcaaacatatcacggtttggagttcattctccctcaaactactatattaagctatagattaatgaggtaatgatgcacactatgacatagctgagccctgacaacatgctaagtgaaaataaatcaagcatagaatataatgtgaacttgtagctctgcttacatgcaattttcagaaaaagcaaccacacagagacaaagaagagcagagacctgtaggagctagaggaactgggcatgaggagtctgttattcagctcagtggtagatagcctatgaacaaaaggtccactgagctggacactcagaaccggtgacttttgtagcatgtgaattgcatctggaacaaaaacccttagtggaacccaagtgtttcatgatgcatttaaaatcatagtttggattgcagcaagcttccacatctgggaggctggagtttccaccttcaaggggacctgggaaagtttggggaactcaggtatgaagcagcatagtcccttttgactttgccatcatgaaaatctgggagttttaaactcagtatgtgttttggtggtagaggctaccacatgctgaaattcttgcctccagtttctgggttgggaggtagaactgaaatatccactttgcaggcattaattacagccaagggtgcaaccctggagccatcaactacagaaggtattcctgaattgtctagttcatacttatgggacctctgctggaggggcttttgggagtgaaggagagggagttgggaggtcactgcttgaatacagctttggagatgcttgtatgttgggagccgaatctcagggcttggcatgagatcctaggccatgcttggcaggccacataacctttacataccagctccttagaatctaagctcaaggaaagaaacaatttaacctagtcctccacccacaggctcagtcacctaggcaacccctcctggacctcttactcatgaactctttaccttgccaaacatcctctttgtggcttcctaatatcctgtctataccaacacctggtgggcaaacaacccattctgcccctccccatatcctgactatataagctagcctgagaaaaaagtaaagtttgccacttgatcagaatcctgtcttgtggtcggtcgttctttctgcgtctcttgcccccattccctgtccctgactctcttgccccagattgatgtcctgtaggtcaggacactcgtataacccttccaccaagccccccccctctttattgtatctctatttaatctaactagaaaggtttacaatccttcaatgaacacagtgtaagaggctcctaccaaccacagccatccttctggcatccccactgtgttagtattgccccccccccatcctgctcttgcatgccttgcctttggacccactattgctctgactaaattcttggtcatttctctacctactcattttttaagcctatatttagagtaatttcctagagacctcttgaggtaggtgcctgccatcctttccacgcttgggcatggcttcctctgagcatactatcattgaagcactgtttgtgcagcaatgctagacacatagattgggtttgagaacaccttggggacaaaacttcttcctcctgttcctggttcttcttagcaaaacctgatgcattatgacccttcagtacttgctttccagaactgctcttaggactgtaagcattcctatgagtgtatgtgacttgtcagagatagactaaaggccacctccagaaagtcaatgaaaatcccagaacatctattaaagaaagaataggctctatttgaaggtctagtataaagaatatcttttatttatttaagttgcttctaaagtaacttaaaatctaattacaaggaggaatgttttccaccaatcaatgaatatggtgaaattaggtcaaacatttaatctagctactcaaatgatagtgtctaatatattaaggagatctaggattaaaagtctgtgtgagccaggcatagtggcacacatttttaatctattttattttaattcacactcaagtgtgaatctctctgagtttaaagccaacctgatttaagtagtgagttagttataggccaggatggcatacacagtgggaccttatgtcaagacaactcctgtgactcaataatggcaaacatacctaaagttcctattagtcctttctaatttgttgaagagtactttagacctatataaaaaccgtatgttatccatatgaatatatacaaatgcataatatattcttttaaaccagagcatcccaggtattgggaggtctagtgttaggttccagtcttcacaatatgacaccattctaatatatatatatatatgaaataagtcttaggtgagaaaatagggtgaaggaatatttctaagggtggctgctagagtttggataagtgcccaaaggccaaaaggtaaaccctctgttccctggtaaccacagttgggaggagatagaaccttctctaagagtaggtcattgtctgtaggggcccatcaaaatggttttgctttatcttggcttaaggtcagagagttcaaaactatccttactcttccaaagtaaaagtcataagacctaaaggtctaaggtgtggctactgtagatgctaggtctttgtttgggatgtcttatctaaataacaagagacttggtctgaggtgtggttactcttaatcctcaaagccagataatgagtgaattagtctaaggagtgattactaaatgtttggagaattaaggaagaaagtctgtttcttccttgtatcatgataaagaaatctttttccatttccccctttttggtttgggtacataagaatgttgaagaaaaacttggggtgttcagtattcactggatggccctcctgactctattctgtgtctctgtcttttccttagcatctttacccgcctttctcaatccacactccccctctcaggtatgaacacaaagattacattacagttgtcagaggccttctgcttattgagggtcttctttttgaggatattggaagacactggatacctctttgatctctattgtttcctggccacgcattgaatggttttcagctccatgcttctgccaagattaggttgcctgcctagtcactagctcaaagcaacagagccaatggattatgggctagaacctccaaaatctgagccaaaataatcctttctctatttaaaaattgatggtggcagtatttcattatagtgtcagcaaagtcactaacatagtctctttggtttgtagttagctgaatactcagagttttccattgcacaaatagcaaggtttggttttatcattaagacttaccagatgagaatgaaagaaaacaaactcataaaatcagggcagtctctggtaactaccactgtaccctgattttatgagtttgggaagaagctggtcaatttttgtttacaatggatatattgactgggcacggtgtctctcccctttaatccctgcacttgggatgctgttagtttgaatccattctggtctacagaacgagacactgtctcaaccctcccctccagaaacaacttcaagagattagttggatatcaaggtgcctgtagttaacagcattggtgtatatgtgaaaattactaagtataatgtatatgtataaatatttataaatatgtatatgcagtgtgtatatgcatatatgtaaaatatatgtatatgtgggatatatgtgaaaattgctgagagtaaagaatattcaaaagaatgttctttccacattcaaaaaagtaattatgatgacatgatgcttacattaaacagcttatattatccacccctcaatgtaaacatagctcagaacatcagggcatatgccaaaatccttagaattcttatgatcacttaaataaagatagtattgattagagaggctatcatcagatctagttaatttaatgtgaccttaaagtcaacacacataaagtatatactgagggtattattcctattgatagtaaggttgtttatttgactggtgaattaaatattcattttaaaagatatatatagagaaagtggtcagatcaaacatagcactgcattgcaatttttaagagtagtgagtttagaagaaatataacatagtatttttgaatgcacactcacttaatttctatgggaatctatgcaaagtctgggggatataggaagtcaggcatacccagcttcggtgccctcattttttatgatgcacttaacaaattcagtgccaatgcattctcttaattccccagactcaggctccatggggctagatgaatgcttgtggctcatttcctgtggcttccaacttaagacagtactaagccactggtaagccaaggcatctgatatatatgctgtgctatgtttcatgtaaaaataaccatttatgtcttttcttaccaccaaacaatgcatattaattactttgggaaaacaaaaatatggggataagcagaaagaacattgcctgtaattctacaactagaaatccataatgttattaaaaatatagtgtctatatttctagataatttcctacacacacacacacacacacacacacacacacacacgtatattctaagtaaatgtctttttataaaatttaggttacaaaaaacattttttactttaaaatgcacaagaaacaactatccatgttaatatttttataatttcatagtgttcctttaagcacatgaactataatctatttaattaatcccctattgcttgacatttactttttttccaatttttcaaaagtgcaagcaacatggtaatgaatagaactgcaattaaatctttccacacatctttttatattccaaggatacactcaccaaattgaaattatgaagtcaaatggcatggttatttaaaaaaatcttcactatatattagcaaattgcccttctgaaaatttctgtcatttgttcctctccttctatttgagtgctgtctctctgtatcttaacccatactcactagaacattggaagtatctttacatatttggcagacaaaaattgtatcttaacttgtgagtcgcaaaagttctcactctgactacatatccggggtcttcttttggatttaatttgccatgtgtgtactgtcaagagtatgtttgccaatgtatttggtttgtttctcatggatgtttcctttattatcatgcctaaaaattgtatataaatattgcagattttatagctacttggatatatttgggagaaatacttacaatttcttcaataagtctttactggtatttatttgtggtagagatccgttcctcagatattatccagttgtcacatcctaataattaaataagtaatctcacttgtactttctaaatttaaaaggtaattccaattgttgaaaacctttcattgtgttccttgagaacatactgatcaaagtgattaagcaacttcttgtggatgtggggaaatgcaaatgctatatacagtagatcaaattatttacaaaaggattcttgattcccttataaagtgaaaagtggcacaacatcatttgtttgtcaatgtgaccctctgaaagaggcgtctggtcactgtcaccctttcatcaaacctagaatttcttgggaagttctagaaaaagacctggagtgtgggggccaagaggtaagcactgcccagcttccccctaaatgagaaagaatattggaaatattctacctttcccattctaggtgactcagtaaaatgatctcctaaatataccagtcaaaatcccagcatgcataagaaaggggctcctgaagccccacccctagccagggagctactgacaattggaggctctaggagcagtcaggttttttgtttgtttgtttgttttgtttttttgggttttttttttttttcagggatgtagtccctgataggctgcccattctccaggaggtgtttcagtacccatgcattcctgagcagcactcaatagactcagtgtgtttctaaaaaggagcacctggagttcagagagaaaagttagggggaaggtgaatgaaggtaaaagaagaattggagaaaaggtaattggggtggcagcggggcggggggggggtggttgatcaaaacacattgtattgcatgtataaaattctcaacccaaatcataaaaaatcagattgtagccacatggatttacttctaggtcctctactctatcccctctgtctgtacctttcctttaagacaatgcagtgttacttttggtactatgctcagtaccaaaagtactgaaatcaggtattgtgatacctccatcattgctccttttacttggggttgctttggtgtttcagggtctcttcctctgtgtgcattttagtgttgctttatctaaatctgtgaagagtgtcactggattttgatggagatggtgtagaactctttatctatattggtagttggtaatatatccattctcacagcattaactctgtcactttcttctattctctccattttttcccctctagtgttttgcaatgttttttttttaagggtctttcacttcctgaattaagcttcttcctgggtacttttctgaaatgattatgaatgtgtttatttttcaggtttctgtctcagcatcattgctattagtctatagggaagctgccacctttgtgtgctgctactctgctgcacgtgtttctcagttctaagggcgttctggtggacccttgagggctcttgaacataatttatctctacaaaccaggatcatctgacttctctcattcctacttctagccctgtttctttagcctgtattgttgttctagttgacacttcaagcagtgttttgaataagactagagagagctgatatccttgcctcgctccaaattttagaggaaatgcttttagtttttcctcctgtactgaaatattggctatgtatttgtcagagatagcattcattgtcttgagttatattctttctatccccattttctttcagagattctatcaaaaagggatgttgaactttgttgatggccttttatttatttatttatttatttatttatttatttatttaggtttttagagacagggtttccctgtggctttggaggctgtcctggaactagatcttgtagaccaggctggtctcgaattcacagagatctgcctgcctctgcctcccgagtgctgcaccaccaccgcctggcttgttgatggcctctcataaagctatggagatggtcatgtgatttcttacctattggtacattatattgaaattattaatttatatgtgttgaaccatccttgtatccatagaatgaagactttttttcctgtgttcttgacttcagtttgccagtgtttttattgaggattgttttgtctatgtttattagggaaactggtctgtggttttctttttgttgttgttgttgcatctctactcagttttggtactgggataatactgactttgtacaatgagtttgggtaggattctttccttgtctgtttcatgggataatttaagagaaattggtgatgattattatttaagtgtctggtagaatttagcagtaagcttacctggctttttaaaattgggaaactttttactactgcataaatacattctttgatatttttcttgtacttgtttagacttgtattgtgttctcaaatatgatctatctttgaagataaattccatgtactgatgaaaagaatatatgatgtagctattgatagtcagaaaatattatgtaactgtctattaagtccattggatcttaataacttgatgtttccttgtcacttttttgcatggattacctgtctattggtgagagtcgggcattgaagtcagccactattatagtgttgaggtcaaaacgtacttttatatccattaacatttgtttctgtgaaaatgcatgcactaatatttgctatgcatgcctagaattgttatatcctctaatatttcttttaggagtaattttggcttaatgtctgttttctcaaatattaatagctatacctatttgcttttgagttctacttctttggtatatccttttctatcctttaactccacagcagtgtttatctatgtcaatttagtgtgggtcacagcttttaattcaatatgctagtaatctgcttttaatccaatgttttggctaaaaattaagagcattgaactcagagttatcattgaaagatatgtattaataattcctgtcatttggttgttctgtagtctttgtttggtattattccaatgactatgcatttacctagtgttctagcacaatttatcctttcttattatgtcgatttttaatgtttatttgaagtaaatgttctatgcatatatgttttactcttttaaaaatgttaaatataattatgtcatttcccccttccccttcttgcacccccaacccttcctatgtacctcaccctttggtccctctcccctctgacctcatagacttgctttttgtcctcttccaactgtcagagtctttcatgtattctgtgcagtgctaacttagtgatcatgaattccttagtttttgttcatagtgagagtttttctttatcaattatgaggggtggctttgctgaatacagtaatctaaggaaacaattattctcttacattgattaaaatatatcattgcacacccttgtagcctttagagtttctcttgagaagtctgctgtttttgttggggttttcttcagatggaatatcacacgtatagtgtatagctttcgagtacttttctttgttctgcatatttagtgtaatgtggaataggaaaattcttctctactcttaacaatttggtgtctaaaggcttcctctacctggatggtcatctctttctttatatttggtaactttatgctatatcttattgaatatgttttctgtgtctttggtttgtactccactccctctgctgatctatgcttatgagtcataaatttagtctattagtggatttccaaagcactttttcttacatattctctttatactttattatgctttattgtttgaatgctctaattcatagcttatcttcagtctgtcacccatctcagagtataactacactccaaccatttccctgtgagtatagcaatagacatatagatgccattcactgaattccttatctgatttcatgatatctcatgaaactcagcacttacttagcatctccaaagaggagaagaatcttcatgctgagagaagagggcaagctctcagtaatgctgtctttcatttaaagatctttgcaggaaaattagcaaataaaacacaccatatttttctgccgttatttctagtaaatggttcagttttccttattccagataacacaagctgttgtgaaataatctttttgtacactgtgaagatgtgacactctggtaggtttaagaaaaagaggaatgaccaatagctaggaaggatttccaggcacagaggatgctaggaaaacgaagagtagagatactagaagatacagaggaagcagcataggcaatatagagtaaaggtaaccaagctaggtaaaagaatgtgaattaaaagttataagagctggctataaacaagcctaagctattagccaagctttcataattaataataaatcttcgtgttattattggggagccaatggtcctgatggaaaaagtctgactacactacacaatccatagtactaagtatctttcaaatagatgattatctctatgcattgaaatgtaaagtgttttcttaaacagcctgtggtaaatctttctgcagttctcacaatgcttggttaaccccagcaccatctatggctgaaccagtacttgaaataagtgggactatagtctacactctgcagtcaatcctctgtctacacttttcactgcccacagacttctagttagtctcttctttagattatagcatgatctaatcacttccaatagccacttgggtcctagagtttcagcatatggatttggggagagtagagctgctgtaagtgtagctctattatacacaagctgtgtggctctggcacttctcttcatactgtcttggttaattcacctgtgaagtcgggattaacatatcacccatttcatgggcattggaaagattaggaatgaatgcataggaaggtcttagaacattgcttgggaagaagccaatgcaagcaccgtcatcatcatttttttaatcctaaactaaagcatattctgtcacattgttgttgtgttttatcatcttattaaagacaatcatagatactaaacaagagtgtttctgaggcgataaaccaagtgagttttataaccctgattcaaaactaatctctgttttgttctgttttcattttggaagttttttgtcattttatcattctgctgtattgactttgtaaatgatttagggcatgttccatctttttgtctattctgaaagagcttaaatagcatataaattgcctctatctcaagtagtgaataaaatatttcttgtaaaattatttgtgctccaacattctcttggatgaaattctactgaatcttattttttctactcagaaccagggcagagccttaatttacataatggaagcatcatttcccatgtgtatggatttgcgatacaaagggataggaaagcaggctagagaaaagacagttaataagtcattggtaggatcaccagtggtttaggcttgccactgaaggaggccagggagagttcaaaggtgtatggaatgaatgaagctaccaagaaaagtaattttaattcattttggacatggcagttcttgtgagccagagatcccagccccttcaagtaaggcattaaaatgggtcttaagagcagcagaaattgagtggagtagagagtccatgtgcttgatcacaaataaaacactttaaaacaggttcctagagcttgtagtctgggaaatttgggagtccttttgtttttctatcccatctctccattttatttactggagggagagctgtaatgcacagtaatgaatgaatgtcacacacagtatgaacagcctttcccatcaatgaagacaagggcaggcttcagcagtccttgaacaaccaagccccgatactccatccattcaaagaacaagggattaccacataaccatgagaagatgaggcaaagtctttaaaagcatttagcacaggtcacaactactcacttcccctgtgtctcatcacagtgagtagagattgtcagtcaaaatgggagcatcaataggagcaaatcaaagccttgtagaatacctattccagcctgcctgtgcatattgatgtcttacatgcaaacccatcccaccctccaccagcctcattcccgggttggccacattcagtcatgacttttaccttcactgccctttgcacaagcagcttcccctgcctggaatgacccctcccccatctttgcttcccacttgacaagcatgcactttttttctaatgctgggttccaatgctataatgcctatgaaaggtttcccaggccacaattgctttcaagttttgctgggggttcacagcattcagaaccgttcttttctgcagagtgagctctctccaagctggggctacaatttatttttacatcttctcttagtgacaatgaacagtgaacagcagatatcagatgtttgcaagtgctggttttgagtgcatatatgaaatcatcccccactaaaggtgacagttgcacacactggctgcagagtggaaacaaaaaggcgtttccagaacagctcttgacagcagactttatctcatgctcggttgagggaagctcccactgtgttttgtttgtttgtttgtttcccccaaacagggtttctctgtgttaacagccctgattgttctggaactcactttgtagaccaggttggccttgaatggctgctagatctgcatcagagccattctcctctactgggttgttactagtatctggaaactgcagcaagaaccctagttatctgagcgtctaccaagacaagatagagactatagttcttggttacctaatagagaccttctcactgaaacccagaaatctgagaaaagctttagggaaagtagagagttttatgttcctacaaagaatgaagagtgccggacatggagtacatgcctgtaatcccagcctaaaggaggcaagggaggggaattgccttgagtttgagaccaatctggcctacatagaaagacctgtctgggaaagaaaaggaaaagaagaaaaaggaaagcaaagaaagaaaagaggagtttggtgggttcaatggtttagcaggtaaaggtgtttgccacagaaatctgatcatactgtgaaagaagaaaaccaactcccaaaagttgtcctttacacttgtgccacagaatgcatgcataagactgaagatgatagaagaaggtacctgacctctacccttcacatgcatatgacacatgagtgcacagccatgtactctgcatatagtcacactttcttgccatcattcttgttactactgtaattataagccatttgccacatatttgacggtttctttggcagagcagggggtgtgtttagaagatagtggctgctttggcagaagtagtgtgagtggccaagtagctttccttccagcaggagacactattctcttctgtgtggtgggaatattggagggcttcactcagtcttagctgaaatgccaaggggtgagtgcccaggggaggagcagagttttcaacaatgcacccatgctacattgtttgtagcctacaggtttgtagtggtttgagctcacagtgagtagcataagcatttagcaggcagtgagggacacactgccacagctgtccaagtgaagtgcagtgagactacagagtgagcaaagtctgaaggctctggcagcttccccagacctgacaccaaaagcatgatccatcaaagtggaacactggggagttggacttcatccaaactaacacctctggtctctgaaagttcccatcttgaggatgaaaagcaaactacaaagtggagaacattgaggaaaccatgtgtttgacagtggaccacagtctagaaccagtgcaagcccaaagagggtaaaagacatgaatggacagatactcgctgaagaagatctgcaggtggcaaataagcacagggtgtctgtcatcattatccctcatcaaaaatgcaagctcatcctatgtatgatgagggtcttccacacagctatcggaatgtccaccatgagaaagagtagcagcactaaatgttgtcaaggatatatggaccatacatccattgtggcagcgagctaaatgatatggtcactcgagtgggcagattttataggtagatagatgacagacagacagacagacagacagacagatacacagatacacagacagtcaggtagatagatatagatgtaactatatgcatttgccatagcaattgaacttttgggcaatttatctaatgaaatttatattcatgtaaacttatatgtgaatgtccaaaacaattttgttattagtaatggccccaagccagaagtggcttaggtaaatgatttcatatttgaatggttctataaactttagtacttccatatcatagcacagaacttgacagaaaaaaaagaagcatgattgatacctgcaacatcttggatgaatctccagggagattaacaggcttgaaagatgagtactgcatgactccacttacatacattgtgatatgacaatgttttaaaatgggaagaaaaccattggtgatgctgcataggcgaaagggtgggtgttggaaggaagtgatgttaccaggggcaacatgaaatgcatttgcggtaccaggctttctcttttgggccaccaaccagctcccaaatcatgacatggggagtttctattagttatgaaggttcatccttagcttaggcttatttcttggtagctcttataacttagcctgtttctttttatccaagttttgcctcaggaccttttacctttctttctgtatgcccaactgtgtgtctgctggctggtgacttcctctctttcttcctgattctctactcctcttctcttattcttctctagctgagatttctcctcctatttattctctttgccctcttggccggcctgtccctctcctgcctagctattggctattcagctttttattaaaccaatcaggtgtcttaagcaggcaaggtaaaacatctttataattaaacaagtgcagcataaacaaatgtaatacgtttttacatcgtttaacaaagtcagtagaaacaaatgtaagacatccttacacaattaatataatattccaaaacaacttgcctgataaaacctattcagtatcttcatggtggaggtgtacattaaacctatatgtgtggtaaaatacagaaacccaagaggcatgagtacaagctaaaatacatgatccagataggactagtggatgctagtatgaaggtgtgacagtctactctcactttgcagaatgtcactagggattgttggtgaaagggtctacagaatttcttcatagtatttttatacttgcatataaacctgtaaagatattaatagcattaaaaatataaatgtaagtgtactaaagcttcttggaaagtagattttttcacagtccagatctttgtaaagactagacattatttctcattccaagtggattgtgttggcatgggatgaaggtagactaacaaaggctcaccttccttgtagtttttctagtgctccttgattgggtgatccaataaaaagtccttcactgagactgcttcccaggctgtaaaaattgagctaggttatctttaagggtacaactttcacactccagggtggtaaatgtgttagtcacctgaacgaaacagtaaagggaagaaagactgatttgggtgcacagttttagaggtctcagtccttcatgctatggagggcaaggcgaagcctcatggccgtcatgaagcagcagaggggagagactatgactgtgctagcagccccctctcttttccctatgtgtacccaccatgtagctcaaggaggctttgcactcaccatcctcctgtctcagtgtcacatgttttgaaatcacagcactatgccacaagaccaggttcttccttccccttctgtttcatgtgcttattgggtgggtgctacctacagtcagtgtgggccttcccacttagttaattccttagttaattaattcgaagacccacttctcatatgctttgcaagaaccctaagtgcttctcaatccaatcaaattgacagcgaggatgaactatcataaggccaccccttgccaatttggtctacaaacacatcttatcaagctaaaacgtccatctcaacacaaaagaaggtttccaaagagtgtcatgtgtcttcagacacttaggcaaactcttagctgtgagatgcaatagcagagtaaacactcccatgctaaaaggcaggaatgggagtgtcgaaaggagagatgagaccagagtgaagccaaactccagcatgacaagtgttatgcattcaagatgttaggctttgggggctttgtccttagcttgatgtcactagaggatagcagagtctttgagagatggggacaaatgagaatttatctaatcaacaatggtgtctcccaaaagctgacagcaaagaaactgacatttccctgctgtctccaaatgttttcttgtcatctttgttttttttttttaatgcaaaggttaatttctagacactcaattctgttgcattggtcagtgtatctgtctgatgctacctgagattgcatttattactttagcctcttggagtcttaggatggcccttagtgggatgttgctagcattttttttttttttttggttcaaaatcatagtaagttttaagaaccaacaccatcatgctgggtggtagtggtgcacgcctttaatcccagcacttgggaggcagaggcaggcagatctctgtgagttcgagatctacaagagctagttccaggacagcctccaaagtcgcagagaaaccctgcctcgaaacccaaccctcccccataaaaagaaccagcaccatgctacatatttcaacctgtggatcatttgctgtgattcaaaatttggtagtgattcctattttcctatggcaactaaattcatatactttgagatatataatgttaatattcacgtcattcctaacaattatcatatgtcttttctgatatctccccctcagctttccagaagaaatcaccactctgccttttttccagcacagattagcattatctttatgagatctttctgtacattcaatacatgctttactgaggtcactgaacatgatatgcacaatacactgaacatgtatatatacacatatatacatgatatatacaaactacttgcatgctagtagtttgttttctgctgctaagaccttgtcacaatttgtttagtcttaatttgatcactctgaatctatgtcaaggtttctgctattaggaatgcattgatataaatattctcatacccgtatttttgtgtgtcttagtttattttcctgttgctgtgataaaatatactgataaaagcaattcaaggaaggaaggctgtgatggctaaagggacagtacattaccgtgtagccatcaagggaacaggaacttgaagcaactgtcacttcacattcatggtcaggaagaagagagcattgagtgcattctattacagccttttcccagccagggaatagtgtcacctctagtggggggttcgtcccacttgagtaatgttatacccctcagacagacccagaggccagttgcacaggcaattctagtttctgttgagttaaaatttaactctaactgtcacaacctgcattgttttcatttctcttaggtcaatgtaacagtgtcacctacatccagagggcctaatttggttctgtgcaggttccccagctgtcagttccgagtcagtgagctcctactagctcaggtcagctgtttctgagggttttcccatcatggtcttgacccctttgcttatattatcactcctcgctctctttgactgaactctgggaacttgtcccggggcttagctgtggatctctgcatctgcttccatcagttactggatgaaggttctatgatgacaattggcttggacagtttatggggccactggcagaaagccatgtgtttatacctccaccctcactggtttgctttctttccattctcactttccatccgtcatggtagagtgtgtagagcatgaggctgctcctttacaccatggcggccaaccagaaagctgaacatagaactggatacagggctgagtcctacatctgccagatagatcctatgtccctaaggttcccagatttccctcagctggggacaaggtgttcaaacacatatatgagccttcaggggacattttacctacaaaccatgacaaaagcacagtaggaattaaccttcagttacaagcagaaaacctccattgtgtgttaaagagaaagaaatttttgtactcaacacttcagatgtctttttgtgtcttccattgtattttggttttcaccatgtgcatatgtttatctgagtatggttgtgtgcatgtatatataggtgtccatggaggccagagcagggtgttggatctcatggaactggagttaaggctgatctcgagatgtgagccatcagtatgggtgctgggactcaaactcgggtcctctgcaagagcagtactctcttaacttctgagccatatgtccagcaccaccccatcccacccacccccaatttcttgggttcttgggcaatagaatagagcagttccatgtttcaattccttctgagttctcatgctggcatccacctcagctcatttgtatagttgttatataatcccaaacccagaagtgtcttttctccaaactgggtgaaatggattcacatttagaaagtatttaccaaatcttcctttcaaaaatgcacatctacattttgactttactattcctaagattcgtgtagaaagatatttctcttgtcttcctgtgatcttagggtttttcccacagacacgcgggactgtgagttcaaatcatattaaaattcagtttttaagggatatagaaatgggtaggtacttaagagtgtgtgctgcaagcattgtgagttcagtttccagcagccactttaggtgactcggccccaaggaatctgatctaatgccttctcctggcctcagcaggcatgtcataccacatcataccacccatacatatttcaataaaatccatttttaattccattttcatagtcgctaagagctacaagaagtctaccactgtatcccatctgcgagttaatgaactaggtcactgctatgttaggagtattgacaacacagactcctgggtcagaaataaaagagctgatgactcaggaaagaacagtagtcagagtgaaggggaatatcaggtttctaagccttgggttgcatgggcagctgtgagggctggtgccatcctttgtctcacaggggaacactgagcctgagaatctaccatgttgcagtaacagtagtctctgtttagatgaagatacagctttatccttcgaggttgttcatcacacatgcaaacctgggaaatagctcagccaaaaagcaggcaacacctttcattcccggcaaacccagcaagacatagctgaggtagtccaagaggtaaatgggtggcactagaaaagggcacattgaatgaggcaacccagacccagaaagacaaacatcacaccctagttccaaatctatagagctgagtacataacctggagtaaccacagaaaccaggaaagtaaaaaggtattgtggtagtttgaatggaattggcccccataatctcacaggggagtggcacaatgtggcttccttggagtgaatgtagccttgttgaaggagatgtgtcactgggggaaagggcaggatttgaggtctcctatgctcaggataccacccagtgtctcagttgacttcctgttgcctgcaagatgtaggactctcagttccttctccagtgccatgtctgcatgcatgccaccatgcttcccaccatgatgataatggactgaacctctgaaactataagtgagccaccacaatgaaatgctttctttataagagtttccatggtcatggtgtctcttcacagcaatagaaaccctaagacaggtaccattgcagaggaggggtaggatgatcaatagagaggggaatggcggagtctaagtgatctgaagggggaaatgggaaaatggggggatctaattagggaggagaaagggatatgaacacagaaagagagtaaaataacagtaaggatatctgaaaatataaagaatcacactgttaaccatttacctaaaaatacctataaaacatgtcagttggtgtataaaaatatgtgtaatgtttaaacatttttttttcatttgagttggcagtgcttcccccaagagccagagaccatttatcaaaaaccccaacatcaggtatgagaagccctcttttgaattgttggtcagggttatccaagagagtcccaaaacattataggctctttctattacacttggttgccccccaccctgccccagaggtggaagataagtacccattcagaagacaccatgcagtttggacacagggctcagagacttgagttagactgaccagaatgctgcctccttgatgactacctttgtggtactagaaggcaccatgcaagcttccaaaggagggatcaaacaatagtcctacccagatatgatgcctatgaagcacaactaccagcatggcccaatgacactaaggctcccataattgcgaccataaattagcagtaaccaacagctctctaactggacttcggctcaacaagagggaagtcaagtatgatcctggaaatttagccaactacccagagctagtatagtcacggatcttgtagcagaacccataaccaccactttattagaccaatataatccttaactacattctaaatattgatctttatgcccacaaataagtataggtttcacctctcttggaagaaacatcacttggcaacagatggaggcattacagaaaaccacaaccaatcaaaatgcaaagtcacagagctcagtccctactgaaaatctacagcacatctcctgcacctaaggctcatggatcattttggaagaaggggaagacagattctaagacccagagaaacagggagtttgctgtataattatttctcctgtaaatatcacaagctacatctacgaactctcaattgtatgtctacctaacttgacttgaacaatgtcaacaccagtaaaatgtactgaaatggatgggagaaagtctgcaaggcctcaatcctaaacaaagaactacaggaaactaagaaatgcagagttctagagaaaaatagtcttccccagggaagaatacaccaattggtattcagtatcaaatggtcagtcctgaaaacatgctcgtataagtaacataatgcagactgagcattgtatatttgtgcacaaatacaatcttatatatactatataaaaatattctccatatatgtatattctcaaatatttatatgtattatgttatatatatatatatatatatatatatatatataatatatatatatatatatatgtaataacaattaaagaaaagcaggccatgaatttgaaagagagcaaagtaggggaggggggacatgggaaagtctagaaggagagaagggagcttagggaatgatgcagttatattacaacctcaaaaaataaaaagtagcttttaaaaactgcagacaagagattgtatagcaagtgccagaggaacatagggttttctgtaagattgtgtctcctaaacctatgacatctcatcaacatggctgtctcaaggagacctgaacactaataaccccggggatgcgctgacctggaggagggaaaatctgcaggactttaacctagacaaaggactttgggtggatgctgagagaggaggaaatggtcttcctgggaaaagcttacaactggttatccaacaccaatgggagggctgaagggaagaaatggtgttatgctctcaaaaataaattatgataaaaagaatatatggaacccatgaaggaatgactctagatatgtttgctttgtgagaaagagggcaagcactttgtcatttaaaaacacacgagagagtgcctgtcaactacctctcatcagaaaagcatagggccaaaaatgtttaagattttggagattgtatgattttttttaaaaatggactttacttgttgaaaatccatgctccataaattggaaatgggagacatatttatcattcttaggtcaaatcaaatcaaatacaagcacatgtgttaacagtcttttcaataaaaacagatagaataacccagagtttcttttcaagtgaaccctccactgtttcagtcgtgtgggtagtgcacggtgcacacttcaaagcagaacagttaggccaggcctcatgcgtgggtagactcaaacctccctgatgttagcccttcaaaatatcctgaaaattgtttccagacaacactgaatttgaacatatcacaaactcttcatagctttcatttattggagggaaccaggtacctattatacaaaaacaattcaaatatgttttgtttgtttgtttttgattttttgagacagaatttctcggtgaaacaatcctggctggctctcctggaactcactctgtagaccaggatggcctcaacctcacagagatccacctgcccctgcctcccaagggctgggattaaaggcgtgtactacccccacctggctcaagtatgtttgaggcacaaatggaacaaaaaatccagattacataagctaggtaatttagaaggagattcagtaagtacaaaatccctctcctcttaccccacaaactcaatgccagaagccagagatgacagcctgggatgagggatgtctaaggtgtagatcgcacagcagaatcattgttggccctgtgtggaaagatctatgtaggcattatggtggggcctccatgttaaaagtcaaagaaaacttaataactacattttgagtactgagtgagggtcttctctgcaatcacaaaatccatgatagagtcctgatttcacaactgactcccagccaggaagcagtatttgtgcgtcagctatgacagccctcagttctgatggggttacgttggggtcgatcttaataaagacaagaaactccttcttctaccataatgaaaaccaggatgagtcttatctcgagatatgacttggatggtcccaaatggcccaggtcccagacagcagtagaatcttgattgtcgtttgtcagcaggggtgttgacagaggcttgcttcctgtgtcactgcctatcagatataattgctgagttttcaggatgtcccccccccattctagaatcagaggaagccaagcctgaagtgtgaggctcttattttatttacaagtgaaggaacagctgtcacacatctggaacttaggagaggaaaaaagaaaagcaatattatgaggtgcaggggtgtaacctgtattgagaattatgtgggatcacaaagagaaaatgatcaaatatcccaatagatgtctgtccccatctctgtaatgtgtgcctcttcccagcatccctcctccagagttgtgactcagtgagttcaaccctggctgggtcaagtgttaaatcattagcctatggtaatcccaaagactgtgtgatgaacctaaaactaaaacatactttacattgtcttttcctttattcatgtgagagcaggggtgctctccatgcttcacatgtgaaggtgacaggacaactgatgggaatagcttcttccctgtcacaatgtgggtcctggaagtcatcctcgggtctgtcaagtgcctttacccaccaggtagcttgctggccctgagacacaatttgattcagtgtgctttcagaggcagtggggatatttaatagtgatgtcaagtgtttttttttttttttttttagaaaacatttagtacatagactgagggtaataccataaagccttgctggagattatgtgtgtgagctattggtatgtggccttttaggaaaagccttagcgattatgtttatatataaaaccatagtggaggcaggcagaagccctgtgtgtgagaactgaaaatagcccagactgtaaagatggagctatgtagacctgtaggctgatgtgtctaaaaaatggaaaacaatagccggtgagagaccagacagatacagaacatttttgatggggtaataaagccacagtgaggactttcgcttctcttgggggtgggagtggggcaaggaggcttggaatagaggactgacgtgagctgagaatgacatcatttttataacttcctaaaatcacgtaaaaatggatcgtagtgtaactctcatagcagccctgtgagagtagcacatttctgtagttcattcccattttcaaacagattcacagatgttaagggaattgctcaaacaacaaagctaaaaccaagtcacctgagcttgcagctccaaactgcctcttcacccttcatgggatgagttgttggcattgagcacagaaaacacctgtcattaacagggatgacatcatgaagacaggagagccaactttcatccacattgcactgatggataagaaggaagacaggtatggattttgggaatcatttcaaacatggaatagtttcatacgcatgtcagagtttcttgataacctttaaaaatagatgggttgttacctctctgtcttttcaggagagtgcacatatgatcttagtctgaacctcttgagagtcatgtgactgtgcctcacgcagtccctcacttctgcctttacttctccatccttcactgagtcttgactaggaacaggaatactccacataaccacaatggagttagaaagtccagtgacttaacgtccctgcagtacggtattgatctacaatccactgtcgaattttttattgttcggatgatgtcctttgtcatgttttcccaccagagccaggagctgctgtgcttcctagctcgcctttattctaaatattcttcagcctttcacaacataacaatatttgaagtgaaaagcaaaacattcccccaactggtttttttttttgtctttctcccccgtgaagagaaagcattgcaattgtgtcctggggggggggggatcagggaatacggatgcccctcccccacttctcagtggcaatgataaccctgaccacagccgactttactgtgaagattgtgttctttctgttagctataactggtcagcctctatgcagagggactttgagatgtgtaaatggcctgcaccacacccagcagcctccccctccagagatccattgccatgagaaagctgtgtatatttttgtatattattcttgtagcctgcaatcctactaggtcacacattgtactgattttttaatatttaaaaccaacttgaatttttgagttaaaccccattgtattaaagtacgaatccttattgctgggttaggtttgctagagatttataaatcatttctctgttcatgtgctttagaatttctttgtattttttcaatgtctttttctggtctgggccttagaataatagtgaccgtatgtagcaagctggatgtattcccaaacaaaggtttcttaggaggaggagaatttttatagaatttgagtcaaaaattttcctcagtggttggtatagttaatactaaacacaaattgacatagaattctttccctcttcctccccctctctccctgtcattccctgtcatccaggctggccttgaactcatgactttaactcccagactccagaatgtattacaagtgtgcaccatcacacccaactctccttcattttattgttgacatgttctttttttccttgattcttctatctggctagccagttttttaatgttatcaatcttttcaatgaatcagcttttggttttgttcccttttctctgctttttctgatacccatcttactggttcttgcctttcttcctctggtcactgtttacagacttgctgttttctaccttttacatactgatgcttgaatcattcttctgagatctcccttttttccctggtgcacattgatgctttccactcctgttttacatattgtcctaacaatgtttttccccttgcctattgtttcatttgttagttgttctttgacctgtgaattctttcctgaactgtgtattatttccaaatacctgtatgtcttaatttccaaatacatgtgggttttcttagatactggtctttcatgatttctagctttctaagagcatggttcatatgaaacagtgcatttgaaattgttgccctttttgtagtcatcaagctggtctgtcttgattgctcttctatgagtttttgaacagagtaccttctactgttcgctaatatttggaatagtctctaacagtccaatgagttacatcttaaaggatctcattctacttactctgtaagatattgagagaggagttgaaattacaactccagctctatttacatactctttataccctttgatacataaaagttggatgctatcgaggagtattgtcaagttatacttcagataatgactcaagaaagcaaaagtaagcattccagtttctggaaactgtttttcaacttttttcctcttgtatatactttgcttaatcccaaatagatcatggctaccctatgttctcctgatttaggtgtttattatagtaacattgttctgtaatcctctttcctgctttatgtgcataaaacatctacattctactgaaatatttatgggtgaattcacatgatgtctggaagtagtttcaaagtataaagccaacataaccacaatcacaattgtacatggcagtagtgataatgtgttttgacaaaaatcttaataaaatttaagtcttgttaatggaagtctttatattaatctactttatgtatattttaaatattttatgatataagaaaaagtcatatatgctttgaaaggtcatgaaagtacaaacgtatcatgagctatgaaggaacaaatcacattgataggtaggttggccctctgctagccatctaccatacacagtgcaatgttttggagcatagaaaggcccattacaactgcagcagctgtagtagagagctggggtagctgagtaacagaaccttgaaatccttatagatggggtcttctgcattcaaccagtgtcacttagactattgagcacagtagtctgcccttaaagaaatcagcaccagcacattcctttccacttattaaagcattctatctaagtcaaaagggacttaagaaaatgtgtcaataaaatattgtttaaacttatttaaccatataaaaggagttactataccttagtgatcatatgtcatgtggaagttttcacagcctctgtggagggcaatttggtgagactcttcaaaagagaaatgtatgtgtccttgaatgttattctatgaaattaatctttgcatatgcttctaaattactaaaataatgactccaaaatattacccataaatcattgtagtaggaaaatgctgaaaaccacaaaaaaatctatctttatagtctatgggcaattgagaatatcatatagttgatgaaaatagcttccattgaaaataatttttttcttttactacatttactttttaaatttcattttacattccaaacaaagttctccctactacccctcctccagctccctcagactctcccctgcccacccccatccactcctcccaaaagataagtgttcccatggggagtcagtacaaattggcacatttagcccctccctactgctttaagtctgagcatggcatcccctcatggggaatgggctccaacaagctagctcatgcaccatagatagatcctggtccaattgccaggggcccctcacatagcccaagcttcacaacagtctcccacatacagctccacagctgtcggtccatggttcttgagtttccatgagcttggttcagcttcctctgtagatttcatcatcatgatcttgacctccctagctcatgtattccctcctccctctcttcaaatggattccaggagctcagcctagtacttggttatggatctctgcatcttctaccatcagctgctgaatgaaggctctatgatggcattttaagtagtcatcaatctcattataggggaaggacatttaagatagcctctctaatattgcttagattcttagtctgtgtcatccttgtggattcttggagatttccctagtgacaagtttcttgttaagcccgtaacagctcactctattaaggtatctctttccttgctctccttctctgtccttccccgaactcgaccttcctgatcccttgttcaggtcagctgtttctatgggtttcaccagcctggtatggacctctttgctcatcagtcctccttctctgaatctggatttcagttcagttcaagatttagctataggtgtctgcttctacttccaccagctactgtatgaaggctctagaatggcaaccaaggtagtcatcaatctcattataagggaagggcatcaaaggcgtcctctccactactgcctagattcttagttggggtcatctttgtggatccctgaacatttccctagtgccagatttctcttgaaatctatactggctccctctaccaaggcatctcttttcttgctctcctctcttcctcccctgtctcagtgttcctgatccctcttgttctcctcccccctcctctccttctctttttcctacctccctcccctctccccacccctcaggctcacaatttgctcaggaattcctgtccctttccccttatgctttctgttccatgcagaatcttgatttaaatacaaattacaatagtatattcagtgtttgagaaacctgtagatctttagccctgtattgggcacaataagccattttctttcactgttcttataacttaatggtgttgatagttttagaaagaaggtctgctttttagatcaaattggcctttaacttgcagtaacccctttgcctccgcctcctaagcactggcattgcaggtatgtacccccatgactggttacctctctattttttttttagcagtttttaaccaaaccaacatatctggaaaccatttcattttctgtctgtgggagaatctgccctgtgattcccaggtatggtgaggattgtcccaagacaagtcagttcatcaatagcactttactattgtttatggggaccactcatcatatatgaacagagagtgtgcttaaatgaacccttcagagcagaagctctccacaaagaatttattgatgcagcaatctggtgtgtgtccacttatagtccccagccttgcctgggatgtgtggtcactgccaatcttgggaaagagtggagttaaaatctgttcccggtagtttgaaattgatcaattatttctcccctgaagtaacttgctgaagacgtgtattcaggccaatctgtatatagcacaatagacctgaaacaaactacatggcctctttctaaacaagtagttttataacatccttagttaacagctaaaataatatgacaggtaacaattcctgtgaggcaaggacttaagactccaaaacattttctccaatcgttcatgtcttaagaatacctttcccctcagctcacagatgtagtgagggagtcagtctatagcctgcacatgagatggctagtctgtgaacacaaaatcaggatgccgggagggtaaaattctgcttccagggacgccaaagaatgtggagtgcacagagcatttgctccatgatacttcattatcataattctggctgctcccttatagtgtgttaggtcgaggaactggtgacccttcttgtttcccctgtccttacttatagctgtggctgggtttaatattctgttcacactaagctacaagtttcaatagttttccttcttttaatttccacaccactacttacaccaggatttctcaggctaggcatcactggcatttcagggtagatattccttattgtgggagctcttctatgccctaatggctattgaacctcatccgtaacttaaacttgctagatgctagaggcatcctgcccctactgtgacagctcagtgtcttcagatattaccaaatatggggagcaaagttactcctggctgagaatcattcttttagagaggttttgagatttctataggttttatcttctcaacataaacataaaattgaaaggatagcaggtgaattgtagcttgcccacttcctccaatcacttatttaaccaagcactagagcttgcaaactgagagaccgaaagatacatttatcaggtcttacactttgacccacagggtgattttgtttcaaattaagtttgaagtcataggggaggcctgtcttctttaatcttgaatttttatagagcatggaattcaagagaggaaggatgatttctttcctcctctgaactcctaactgctagaactttcttgaccagttagcactcaccttggttaacaattaataggcatgaacacctctctctctctctctctctctctctctctctctctctctctctctcttggtttttctgtggctttggaggctgtcctggaactagctcttgtagaccaggctggtctcaaattcacagagatccacatgcctctgaaaccatttctcttagtaatgactaatatcaccaagtcagggctcttataaaagatgtcctctgggctctttataggtttcccaatcctaaattgtcagccctaaacatgtgcacatatggactcagtatatcacacacacacacacacacacacacacacacacacacacacacacacacacacactgtggaatagaatatttgtttctaagtaaagatgtgtttcatttgtttatgctgcatttgcttaactatgtaaggtgtgttgatttgtttttgctgtatttgattagctatgtaaagatgtgttgctgttttaccttgccttcctaaggcacctgattcatataataaaaaaggtgaatttccaatagctaggcagtagaggggtaaatggtgctgtcaggcaatgagaataaataggaggaggaatctaggctggagaaagaaggggggagaaagagagagagagagggacaccagggcaggggtcagccagacacttcagaagcaagaaagtagggcatacagaacgaaaggcaaaaagtaaaacgaagatgaagagaaacaggttaaattaagttataagagctagtaggacaagcataagataaggctgagcattcgtaattaaaaataagttgtcatgattaggggctggtcttctgagaaagcctgccacacacacacacacacacacacacacacacacacacacacacacacacacacaattatagaagaggaggtcataaattcaagaaggagttggagaacacgagagaggctggaggaaggagaagcgtgggtgaaatgatgtgtcgtcatgcatgaaattctcagaagattaaaataaagatgatggtccctccctctacatgactttagctcaccattcatttcctctttggttttctttattcatttccctcttagtttgtccagtaggtgttctgagtacctacctcacgtggcactatgctaggcctcaatgctcatagagggtttcccagtgttcattctgctcaggcagcacagagcctctatactggggtcatgtggcttgttcagattccattttaaggtcacctttgcataattagttttaagattcaaaataatattaatacaactactattagcacttcagcttgattatggtgttttgttttgttttgcaggcattttggaattcttttgatcattatttacatgcgtctacttttattcaatgctgaaccatccgctcatttccccattagagttgataaacacccctgaaggtgcatttaagaatgtctgccatttccctagcccatcctcgatagtggaatgtttaaatagttttcattgtgttctattataaagcatttcttggctaacacaattagtaacactctcagattgtagataaatgtccttgagctgtagcttttggtggtttcattcccagaagcccctgggagctgagcgagtgtcagagggcatgggctcatgcttcttgctctgttgaacacagcccagctgctgtctaaaacacagcttctgctctgtgagctgtgatggctccatccagccatgatcaggtgtggtatttcattgaaaaagagtgtaaaaattggatgccaaaggtttttaaaagctgtctactatctcagtttttttttcccaaagccagaatatcatttaaatttgagtttcgtttttttgtctactggtatgaaatcaaaagaggattttgttagcatatcagagtataatcgtgggacatgggttggacatcatctctctaacatcagatccctgtggcagggacagtcagagctgttcacaccaggctattccagcccctttagtccagtgatgggcttattccttcttgctgccttgaagctaggtgtggaacagtatgctttggccaatgactgtagatgagaagtgtcacttttgtaggacaccccataaagccactgattgcaggagtcaccaaattcccttagtcttcagaccttctctagtctaggtccttgaaaagccctgtgaggacatcatgaagcaaaatcccacagtggcccatggtgggtgagaagtagatgctctaagctaccaaagcagagatgctctgtgaccaggcctgactgccagcaccaggctggtacccgagaggacattgctgactccccaagtacagggccattttaacctccagagccttgcagtgcctcaccgggtaggcatttttccaaacaaggaaagagttgcgtggtatttatgtagaatccattcgattctgagcatcaaagtgggtgacaacactatgccatctgccagctccaattatttttgtcatcatagattaaaaattctgttttaatattcagcagggaaatgacttaatgctggttggcttcgggcaacttttaagaaattgcttctcctttgcaacagacccataaaaactaataataataaaaaaagagctaacatttcatagctcttatagatcgttcattatgtgtcaagagacagtgccaagcatcttactggcatagtctctagtatttctcctcaaaagatgatgaggtcagtaataaaccatctccagtttgagatgaagaaaccgaggcttaagatgaatcccctttgccgaggtcatttactaattaatagcagcatcaggattggaattgcattgtgtggaattctggaatgggagtgcgccagccactgactgacaagaggcactgtgttgctttgttctgttgctgtgagaaataccatgcagcttagaggaagaaagagtttatttagctaacaccagcagcttgcaatcccttactgcagaaacctgaagcaggtaccagagagaaatgctattgctcactctgaggctcatatttcaggtggttgtttgaaggagatgtccactgtagtctcgggttttttaatccttgttcatgctttctccagcagtactatgaggtttcaaagcttattgctagccccacttggccctctctggttcctgattgtgctttgagatgtgagctctcaggtaatatccgagtcaccatgcctgcctgctgtcatgttccccaccatgatggtgatgtcctcttatccctctggaactggaagccccaaataaactcatccttcaaaagttgcctgggtcatgatgttttatcacagcaacagaaatgtaattaatttactttggttgcttccttatatagtccaggaccatcttcccagggaattaatgctacccacggtagtctggtcctttctttataaattaacaatatttcatacacatttccgcaggccagccaattcaagacattcctccaattgagactcatttcttggtaactctaggccctgtgtcaagttgacaattaaagatatctaggataaatagctgtctatagatagacaccctggctctcctcagtctttctacctctaggattctcttggtctatttggtttctgattgactggtatcctttactgatgccttctctctcccttgcctgcctttgccatgagtggcatcgagattttcatcagatgcaggattttgtgaaacctactactgcctagcaagtacctttcagatactagagaaaaataccagtgaaatttatctttgcccttaagaagccaccaccagagtggtgctggtttagaaatacatgagccacatgtggaagccacacatggacactcatatgcacatgtatattaagtgttaaattaattttaatgccatacctcattaatgcagtgcatctaaaatgttatcacttgaacatgacaccagcataggaaatcaaagtattttacatttgcactgtgtttctgaaatctgggtcatttcatttttatacttaacagcatatggacatctaggctggtggaaccattgtcataggtggcgggtagctattgcaagaaggtatctgatggggaagagatggctgggctgggcagaaacagagtgggaattggctctgaaatgcttcataggcaacaccatagtagtagagttttccttgcgtggtcatctgcaggttcatgatgtcctcttgtgtacccttagtcaatgagaatagcatcgttagtaagcctgtgtagtcaagtctgctcttgcttttcttctctccttcccttctagaagtactagggtcattaaaacctgtgtcttctatccaaccacacacataaaaaaaaaaaaaggtagctaggtggtgtttctgggaagtttccataacagggattaacttggataggaggtcacactgatccattgccctttccagcttcttgttgcctggaagataaacaaagtgatgagagctacagggcctctctgactgattccatcacataccatggatggaaactgtactgagggcatctgaggagaagggctcacagcatctgtgtctatagagctttggttctagccctatgctacttcttactaaacctactacataccaaagaaaagattaacccatctcagccgctggtacttgttttatgttatatacacacacctaatcctggctgatggtagaggtaactgcagcctttttaatggaagcttttactagaatctgaaaaaaaattaagccattaggtaagattctagagggagggatggtgtcagaaacaaagctaagaattcacagctttggcctcagtgcagcagtgctctgtgcaatggatagtgttatctaaaggtgtgattcctgctgtctcctctttgctattgttacataaggtagctgtcatgcttgagtgtggctatgattattgacattctatatgggacatctcatgagaagtggtgtggtgagcgttctgtcccatcttctatttggagacagttctttgcctctgtaacttgtcaagagacccataaacaataggggaaaggaagggactgtctctctttctctccttagccctattccagggctgatgtttcatcttcaagggcctctaggttgtcatggctgggcatagacaaggctcagcctggcccttatcatctctagatcctgggccacacaggcacctggcttgtctcccttccccttcctgctgtttgcctcctggctatggcacccctcatttagcatctctagcagaggtgctgatcctcaaatctgtcaactgtgcaacttgtcagctgctctgcagagggctcactgggaagggaggttgctgactcaaggctaagtttgattttcataccagctgcagagcctactcaaccgcaagatccgtcctgcttgcaagttggccaaatcaatcagtggcttattgagcataaacactacttttcagaactacgatcacttctacccctgttgccaatggtgggctgagccaagtcaaatgcccaggctacctgcctcactgcttccaggtgtaggcagcctgcagccttggcactaggactgagcctgcttctgactaacctgactgagccctctggggtatctctttgagtcctcattgctgagcagagaggcaaatgtgcctcttagtgtgtctgtctctaaggcagggcttggcaaatcctagtagtaaggattgtgtaataaataccttgggctccgtggtctttgctctctgttacatttgctcagctccaccactgccaggtgatgggagcataaacatcagtaagtagaagggtcgactgtgtttccacgaagcattactcagtgacacggacatctgaatttcatatggctttaatctgtcacaaagtatttttgtttcaatttttcgaaacatgtaaaatgtagaaactattcttagctcataggctatgccaacacaggcacaaaagttggacttgacccaaaggccagtgttcaccaaccccttacctagaagaaagacaatgtggtgactaagaatatagtgtttgttttgcactgtatgtgtgtgtaaatactggggctgttgctaattggctgtgtaacttcccatcagcccctccgtcttgctaagccccagtctcctcacttgcatgcacaacacaggacccacccaagacagctcctcgattaatgagataacggatgtcaaagtagactccccagcatactctgagggtccaccgtggacccagtgttggacttgacactatgagaaattctgaagtgaaccagacacagcagattgttcaggagctgagagactagtggggggggggtggccttatgccttagtcactgtcacgctcaggagagtgatgtggtctgagacagggaggcacagcaggaacagtttgtcatctccctgtcacagtggtgcttcctggggcttgggaatgctgtgaaatttagctcagagagcctagctgctgaggtctgccactgagaggccatgctggctctttggttgatttctacagcccacagatgcacactggctttggaagttgggctttctagttacctctgccagcaccccaggctctttcctcagctcccaggccctgagatgtcaaacggtacagctttgctttatgctggaatggatcccagcccagctgagtttttgtcaaagaaatgtctcactattgatgctcctgttagatgggaaggtcttctaacaaagcccgtacattctgttgatgagctgtttgcagactaggtggccgacatggtgatttatggttttatttgctcatattctctagcttccacttaaaacatgagtgtggtgccaaccttttggggtgtgggtgctggttttacaccatctgaccatcaatcagaatcataactgagctcatcaccaggaaaccttgtgtaatagtttttgtcttacattacagaattttcatttttaaaataggttatatctcactatgtagccactgttggtctggaacttactatgtagtccaggctggcctggaactcagagagccccctgcctctgcctctgtgtctgcttcttaagtgctggggataaaggtgtgtgtcaccatgcccagcaagtcacagattttttttttaacttagcccttaaagatcagagataacaatgtgacatgccatatgctactgtgacataaagtccaagtatcttaatggcacattgatttccaaatcattttcttttacataatgaagaaaccaacagaagatatgcttgaaatcatcacaataaaagtgatgtggaaatactaacccattccttctccaggaagaagtcaaagataacattcacattcccgccattcgcctttgtttcaagagttctttctgaatccgcatcactgtgactccttctgccttccacacttctcagatcctgcactgttctgggccgagttgacctctcaagctctgaaactgcgagttttatgccagtcacagaactgtttctgcctttgacagtgttcctcaggttcatctttgaaagctgtcatctttctcttctccctgttggcaaactcttcaggaaagccctctgttctaactctaaaataccctgtgctaccagctacattgggggttgcttcatttttgaactgttacgttcctttctgctggagtgaggctttgaactgccatctgctgtggtggcagcataggtttttgaacttattctagaatgttgaagtatgaaaagaacttccaggatggggacggcatgaaaagcttggctgtgctgggttgccatgtgacacaattccaaggaacactattctcttcattgcctatgtgagtgttgcagcctggggttaggctctgtacaatttgcctgataagatgctccagacctggaccaatggtcagtgttcgtttgagtcctgaggtggttttggtgccccaccatgggtggtgataccgttcagagattatgggacacacattggaggcagggtttagtgtaaagtaattagattattggaagccatgctcttggatacaatgtatcctacatctcccccacgtgtttgtataaaataagtctctctcctctcctctcttccttcctcccatctcctggagggaggtagtagcttcgtgtctaattttgcttggagcccctccacagccccccactcctgtgcctagcacacacagcaggtgatcaataaatacttttgaataaggagctgaaactgactcaccgccagcactctggcccttggctcagttgtactgtggcatgcagccttctgaggaaagctgtcttggctttcttccacagagctggtatgaatttcaatgctagaccttctgagaaaaaaactcagaagaaaaaaatgtactttggataattgtggggggaaagaaagaaagaaaagacaaagccccagtagatgggacccctagggacctttggataatttagcaaaatttaaactaatacttggtatttactatatgacacacatgcatgtcttgtgtgactaaatatgtgtgtacatgcctatgtgtaaatatattttcacaactatcttatgacataggtattctcacactgattttagaaaagacaaaagtggaggccagtagcttatcctaaatcacacagcctggttggagcttgagctgtctgccttgcactgtgtacttctgtctgtctgtctgtctctctctgtgtacctgtgtgtgtgtgtgtgtgtgtgtgtgagagagagagagagagagagagagagagagagagagagagagagaaggggggatctgtgtatagatcagagtcaaataattttaaagaataacattatatataagtgtaatgctcctgtggctttactgtgatcaatcatgggatataattgataggcacctggcttctaaggacattgagagtttagcttgaggatatttttaaataaattcctggcaaaacttggctagtctacaataataggtagctagtgtccaaagagttatccccaaagaggggggccatctgcagctccatgtggagagccttttgctgtcttcacttccttacacttttgatcaaaagctcttccctgtcgaactgatttctctgacggaagctggagacatgtccctgttggttatcctgcattttcattttgtccttgagggttttcttctctcccatccttctttggtactcagacaacttatcagtgagttagaaccatcccctagaggactctatgtttcagaattccctacttggtgaaatctggtgctggaatgaacactggcctgctttcactccgaacagcctgtatctgttctccagtgtcaatccactctgcaaagggggaaaattatatggtaccataaatgtgcaaatattgctttaagtagtacttggcctatggatgtctgcttctgacctttcctcgcctttcctcctggttgttcttttgtgtttctcttacccggtcctcctttccctggcctcctcctcttcactttggttcttgggcagctgctactgtgaagacagtgcatctcccatctgcttccaacatatgggaccaaggctgttgcttccaaagtcctcctgtttgctgttcaaaacagggtgagttattgtgtggaaggaaggcaaaaacttgtagcatggttcatataatcttcaatgtagatggaagcagatgatcaaccattctttctacacatctacacatccatccatccatccatcaatccatccatctactcatcaacacaactatgtaaacatgtcctaatttcttccacagagattttgagttttttcatacacctatctaataaagtacaaataaagttcaaagtccaatgacatagagcaaccacagaaggctgggccaagaggaaattaaaacacaaacctgcatattgaaggactcataactattattaccaatccatggaacatgcatgtgcacggccacacaatgacagtacaacacaacaaaacaaaaaacacacgtcaaagatccatcaataaatacaacttttaaaattaaaatattgaaaggcaagcaatatctttaggtttagttttcctgactttgggttcacggaggcaaacacaggtagatatcaaccagaaggaattcattgagctattgttgagttcattggttgttgaatctgtggattgcttgccataggagattagatcagtttgttagggaggccgattatgcagtggattctgtgggcatcttatctaatcaaccagtctatagtggtggatgccatactccaaatccccagagttccttgctgattataggggggacttcaggagctggatagttaccttcatagctgaaatatcacaaaggactggtcatcttagtcacattataagttgtttgggaatgattgtggccaattggctaggagttatcacacagctttagagatgaagtccacttaaggagtgatggggcaagtccttctgtgtatgtttatcttattggctgttgaataaagcactgtttggccaatgaggcagcaagttaggcgggactaggagtcaaggaggattctgggaaatatagaaagtcttgtgatccaggcagaaagtgacatagcaggcagactcagagtataagcagggacaaagaggaaattgtcctcttgctcttgctcttcctcctgctctctgctctggagcctccatgtgagcccgggaagacaggaggctcgccattggcatcctctataagatgtcttatgattatggttgataattaatactgagctagcagatgagaaatcctactcattggccaagcagcatttgtacttaatataagtctctgcatgttacttgggaccctaatgtggcatcgggcagaactcgagtggcctggaggaaggacttatcgttacaaatgagtccataaaataactaaataaagtcattggcaagaaactctacaacttctccaaactacccattaaatcgaaaacagaacagagagtggagtgtgcttagctctaattcttcctggctgcttcagacctactgagttttgtaatggggacttgagtacacaagaggtacagactcagatgcctccaaagtgagatagaaagagcatggaaatgcatgcaaaggactgattgcaaataacagtgaatgtggacaactaccatggcaggagatatgagccctttcaaaagatggcactagctgcttcctccagagggactgagcccacacaaaagctcaatctgtgttccatgtcatgtgactttaggcaaaaactcacaattcctacgagacctttctgagttttgaaacacaaatgatcaggttaaggcatgcctatagacagaatttaacctctgctcatcttcacccagccattaccctatgtaaatgtggaagagaaatctaaaaaggaaagtgaatgagccaagacccatgagtatccatgctattatccaattatcatagatccatttctgtgagaaatatggaggttcatttgggactctgaggaaggaatacaagatttgtttcttgagcaggatggccgaactcctaatcagtgttactgttaaatctacacttgagaacagaactagttcttaaatatcaaatgacgaaactaacaaagcaggtccttgtcatccaaacttatatctattgggactggaaatacctcaccttctgagttcaaaataccttcttcactgcaacaggtacaaggtttcttagctgagtttaggggtgctttcacctcatttgtttatggataaagtataaatagaaactccagggagcaatttaaagctacctattatgccaagtgttcactcagcaaaatgaaatgccccaagcattatgtagcaaaggtgcaggttgatgctgagatttttaaattttgtattggatgactgtggcttccctgaagttatctgtttgaaatgtaggcaacacagcactggaagttgtaaaaatgttgatttcatttgtcaggtgtcatcttaaaaactgttggtctgatgaacttggacgtgtgcctttgtgccacttgtttggtgttccccccgcactgctccacatccagggaagcagggagaagccttgggaagccaggacaactaattgaatgatgccacatgttgctgaataaacaagttcttccctctacggctatctgtcaaatgtgccagaaggtgaattctgccttcacttagtgaacggaggtagcatttgtcatccaacagtcattggatgacgtgcaaccttgatcccagtgatatgaataaaggacaggaaggaccaccccatgtcaagttctaggataagggttggagtgtacagactctcacctgtgaggtaaagaaaagcatcgtacggattttaaaggcattccacatgtataaagcacagaactctcagtgggaagcaaaaccaaacaaagcacaaacaattccaaccactcaggataattatcaaggacttggaataaatttaatttgtgaaatatctgggttagtcaatactaccctaaacaagagttcaaggcaaaatgagacagcaatgtgtagtgaaatgtcttctggaatgccaggccttttatgaccaagaagcaaagtgcaggtggacagtgatgataacacagaccggtattgcttctctcaagctctttgccagctgtcatatcatctccctatccatagctcccgctgtttccctcagttgtttctttctcttattcttactccagcatgaccaggtcttcagttgctacctcataatcaatcgttagccagatgactcattgttcagtgtgcagggagggatcaatcatttcaccagggaaagaggcatcattgagctgtctaggcaaatgaagacagggttattcactgcctccattagaggcctgggttcttccctgtttaatcacagagcctaggactcttgattcaggctgagttaccctttggtcagcagttgacttttatctaatcaatgggttggctttcatccagcagtgttaacagcttaaggagccatgaggctgctggtgtggttggggaaccagagctgaaaacttgggttttctcattcccaccttctctgtttttattttttctataatctttctacctctttttggtggcagacaactatgactttgcatactgtttctgttttgtctttaatctctcttttcttcagatgaaagactcacatttccttttagattcacagagggttggtacaagtcaactggcattgatccctggccataaaaacagagatggagcggagagtgatctatgactttatctggatcatcaagacagccatcttgaaaggcctgagttgccaagctggttgatgtaatcctgaagctgttggcggttgttctgctttctgaagaggaaccctgtttaagactaaggacagaagaggaatcaagaaggggaaggaaacgtagggcaagcaaggaaggcagatcaagtcataacaatggccaactggagagctgctggacacagccacttttgaaaatgcaatctgatcttgagttttacagttttggtccatgagtttctcctttgatgagacttcagttttctaccactggccaaccaaacagttttcactgatggagctcttccggatttgtttttatgttctgtcttttccatctctctctctatccactgttgatccctgacccatctccctttgagagactctgatgaccttattatcgtgtgtgtgtgtgtgtgtgtgtgtgtgtgtgtgtgtgtgtgtgtgtgtgtgtagacagagtttccctgggtagccctggctatcctggaacttagtctgtagaccaggctggcctcgagcagagatctgcctgcccctgcctctcatgtgctggcattaaaggcatgcactaccatgcctggcctgactctgatacttttaaactttaggtcttcctctggtggacagggcattagaatcagtttactaggtaggagctcccagggattagagacctgaaccttactggatattcaaactaatgaaatccacttttcttgcctccataaatgtgtaggattactaattcaataattcttgggttgctacttgtctccccactaactgcttatgtcattttggagatattcatagaacacgtctctactctacaagatgtgagtccagttgtttttacagaagctttgttggaaaggtgatagatgtatagacacaacctcatggtccttctgagtagtttgtactaacatttttgttagataaaaacagtgttaaataaatgttatataaatcatggagtcctggtttggctgttaatttcgagtaaggctttgatgagacagacggaaataacactttgcattccttagagctcctgagttacattgttttaagaaaatctggtatgacacttgctttcaaggaatgctggcaagccctttccaagaggagacaaaaagcactaaaagggaaaattacattgaaactagatgacactgtccatttttctagttttctcatgtctaccgtaggaactcatagtatcttacaatggcactatttttcttttgcatttaggggatctgtttcaaatcaaagtcattggctactttgctaagcaatcccacttgtattaagattaaaaagggactcatgaggaatttcattcggcagcaaaaagccttcatgtgtacaggtttggttgtgttcatgtctctatccagtttcaattctaagtctccatggtatgggaaatacatcagattttactttgtaattgcttaactgtgacagggtgaaaaaagtatagggactgtgttatattatatttctgttcattagcaacaaagaaaatcagaaatatgttgtgctattaaaaggttcaaatgaaaataaataaatgaatgaatgaataagctgggcagcaatggcacacacctttaatcccagcactggggaggcagaggcaggcagatctctacgagtttgaggccagcctggtctacaaagctacccagagaaaccctcgaaaataaataaattaataagttcaaatgatgactagatacctagtagatttaaaacacatgataaatcagggataacctgatttggtcagttattttcattaatgtgctagatagttctatgtcaacttgacacaagctaaagtcatctgagaggagcaaacctcaattaataaaatgcagccataagatgtggctttaagcaagcctgcggggcattttgtgaattgttggttgatgggggagggctgaaccattgtgggtaacgccatacctgagctggtggtcctgagttctttaagaaaacagagtgagcaagccaataagcagcatccctccatggcttctgcatcagctcctgactccaggtttctgccatgtgagttcctaccctggcttcctttgttgacaaacagtgatatgaaagtgtaaggcaaataaaccctttcctcctcaagttgctttggtcatgttcatcacaggtatagtaacctcaactgaggcgatcaactgtaatcaattaaccctttctctttcacttcaagaaatgactgaactgaaatagttaaacacctctgattaaacaagggatgaaccccccaattctaaattattgtttgaagaaaaaaatggaccagccatgggttaggaatggaaatgtaaccagaaagcagaaggcaagtgaagatagaaagaaaaggagaagaaaaaagagaaaggtaataaggggaaagaagaagaaagggaaggagaaaaaatagagaaaacaaggtaagaagaggagggaggaggagaaagcagagaggggagaggaagagcaatgtcccatgaattcattttctcaagcacacaatggcatttattgggtgattgctaaatgccatatattacttgaagcattaggaatgaaggaatggagaacaattgttttatctccactgaaatctttttgtcttgcatcatatcaggcaaaacagaatgaaataaggaacatcatattgtcagttgtgtacgctatgctgtgattaggggacatgctgtgatgtggggacatgctgtgatgtggggacatgtggccgggacagctgaatctgtgagacaggtattaccctttcctggcacagaaagatgctgggatcttggtaaacaaactccatattgagagccacacagaccgtatcgcttgtaaatagaagctctttaagggaagcaagcaaacaaaaacagaccccttcaatctggtcttgcaaaggaacaaaaaagaatgtgtctgagaagtctgcatggacccacacgtataactatgtgctaaacttgaaaattagagccttgtcaggaagaagcttacatgtgagaatcagagggaaataactggatgtggctatagcatggtgcggccatgcccttggttaagacatctgtgccagaagaattcatacctatgcattgctggtggaaagagcaggcaggctgccgtacatgacagtcctagtgggtcaccctgtttggagagagtgtgggtgggtgtgtcctttgaacattctcatttacctcttggtgcctgcacctagagggtcctccacatccttctctactctatgcactgcccttagacttctgggaaatacctaccagggacctctttcctgcagaggagcaggtccccgccatgccctcccaaacctcttccatcctgagccacagaggtagcaagtgtgccaaggtgagcatcctatagacttgtctgtgttttaaacagctgctcattctgcactcgcaggaagcgttcccactctgggactatctgccgatgactacaccctctgaacacaagctgcctacagacctaagactctttcatccaaaacaatggcctaccttccagaatgttcttccattgtgctagatttagtgatcccctcaattcttttaacccaaagccccatcatttagcttggaggactggaaaagcaagggtaatggattaaagtctctgttttaagattccctgaaggactccttaagaagctgagggggaaaatcaaaaactaaggtggtttgccactgaacaaaggtttcttgtgtgttgattttttttttgcattgttgtacatcttgtagaaacactgcactgttttacatatttatttaaaccctactataaatgtgtgggtaagttgcaaaggccttctccttcggaaagtgattcctttctgcacccctgactccttgggtgtagtcaacccagaccatagctcaagcatgtccaacaaaaggctctgattcatgctttattaaatagggaccccatgacaggaacataaaatgtcgtggactgaattatgtctgttcaaattcatatggtaaaactctaacccccccccccgaaatagtttaactatttcagtggttgtgtaggaatgtgcatttcttagagtaagaaagtaatggaaggtaaatgaggtgattgggtggagtcttcataatggaagattagcatctgtatagccagagacacaagagagctgcctagcttgctctctgtcctgtgagcacacagcaggtcaggaccctttccataaatccaaactgtgtccttgatcttggatttcccagactctaactaaacctatgaaaaataaatttctattgttttatgcttctaatttgtgacattttgttatggaagctgtcctggttgggttttgtgtcaatttgacaaaagatgggagtcatttaggaagagggaaggtcagtggaaaacaaattcccccactagtttgccctttgggcaagtctgtatggcattttcttaattagtgattgatgtgggaggggctagcacattgtggattctgctgctccttagttgtacaagaagcaggctgagggattcatgaggagcaagctaataaatagctctcctccatgacctctccttcaaatcctgcctccaggttcctaccctgcttggggaggaaatggtttatttcatttgacagcttggagtcacctttgatcatggcatttaccacagcaatagaagtctaactaaacagaagcttaagaaaactatgacaatactagtaatagaataagatgatcttttaagacagccacagtggtttatatccagcactcaggaaactgacgtaggaggatttctgtgatttcaagtctattctgatctataaagcaaatttcaggctggccagtgctccaagtatgatcctgtctaaagggagaaagaaagaaagaaggaaggaaagaaaggaaggaaggaaggaaggaaagaaggaaggaaggaaggaaggaaggaaggaaggaaggaagggaaagactgacttttaaaataataccaatggtgccagtgcacccagattggtccttattgtgtgactgtataggcattgtatggctgctggcacacagctctcttggaggttcttatctacattctccctgggaaacaattggtgagcaccacacatcagctctgaaactttaatacttataaaacctagtagtatcactggacaaaaaaaatagtaccttccaactgtccacaccgcctattcaccaaattaagcaaccagtatttgtagctgaactaaaaactcaactttccttcaaaggatggagatctgtaactgtagagaatattctaaagactgtttgttgaacaaattaatttgccacaggctttgaaagcccaaacaatggaaatgcccaggactcaaagacctcacagatgggtgacgagaactgctgctggcaatctcggagaacccatggagagctggagaggagccagaaggagctgggtaaatattgtctgatatctttttgagggagaaaaatgcaaatacaagaaattataatttacagacctagtaattttgatcccccatagaatttgatcagcaagtaattaggtctagaatttgagggaaaatagtcaaatatattaagatctgagcccgtgatgtgtctcaggaaacaaattggagaaacagagaaaaatggcagtacagatgagggctatgcaacgttttataaaggcgaatgagacaatgtaaaaagaagtgacaaagggaaaagctaacaacaaaatgtttaatgaaaaaaacaagacagtaaaacagtataacacaattctattgctgtgatgcaggggtggaaataaatatgcaaaattcctgggagatttacagaatattactagtgaatgtatttgcgaatttattttctttttttgactttgtttccaatatttataaattcatatgattaagtcatggacaagttatttttaacagtgaaagaagatgtcaaaagagaaacacacgagggatcagaagtattgattaatctattgactttacgtggtggagggtactacgaagggaatctctaataatgtagaatttttacaaatgttgctacatcctattaactgacttctcagaagtgtctggtcaccagaaccaccaggaacacacttaacagtatgagctctggcattctgaaagagttgccctgtgataaggcctcaggatctaattatgggaaattgattctattatggtatatccataaaagtcgaaaccatacatccattaacagtgaggtagaggagattaccccatgaggatcatttatagcatcaaaaatgaagatcaatggttaagacaatataggcttttataaataatatattttttatacgcatgcacatgaaaatgttagtaagaattacttggtcatataatgggattttttgctttgttttcttttttttaactagtttcattttctcaatttttagacactttgttgggtttgtggctattttaaaaatcacaatttgcaaaagataaagcgttagcataaaggttcataatggagatcaatgtttaaccaaagaattattctgattccataaaaaagatatccacatggaagaaacaccagtagggtgagggtttatccaatggggtggacccttccaaactagggaaacagttactgctcagggtacacggtatgatgctggacattgtcaacttcacaggatcaaacctcacccaagagaccaacttccaaacatatcttcgagggaggagtttttaggtttctttagattagagagttttttgaggtgggttatttgaggtggggagataataccctaaatgtggttggccccattcccagacagaacaaaggaggcccagctgaagagcagtggctctctaattcataaccgcgtatgcaatgtggccagccacctgaagctcctcgccctcctgacgattacagcctcacgtgtaagccaaaaccaaagccctcccttctttcaagttgccattgtcaagtatctacgtggcaatgagaaaagtaactgatacacaatggtaagtctaaccctgattcttgttcccaccaaacattcctcactgtatccttgcagattgcatttcttcgggcagagcaggcagcagttatgtgtgtttccatgttgcccagcagaatctttctcatatctgtcccaataggctagcaccagggactcgaaaggctgttttgctcatcaaaaatcacttcccaagctcattagttatttctcctaatacactgattttgcatttcagtttttttatataatgttgtcactgtttttttttttgtttgttcatttatgtttgtttgctttttgaagcaggctttttctgtagctttggagtctgtcctgtcactccatagaccagactgactttgaactcatagagatccacctgccctctgcctcccaagtgttgggattagaggtatgcaccaccactgcccagctattatccctgtattttccagactagagatacataatatgacttgagtaccttcaaagagcttgatttaaatgaacagattttttaaatttgactaattcagtcaataccagcagtaagccatggcttttgaatgaagatcatcatgcctggctgtgatgagaactctggaaccttttgaaaaagaaagaccttttctcactgccacaagcccacctaacagataatggcccagagagaaaatacttccactgatggttctgagctttgagacatagtgctttgcagcgattattccatcctggtgttcccaacatggctcccaggtcaagaggcatagccaggactaactaagagggaatcttgggagttatgcatggcaggagtgctgagggcacaggatgcatctcctacacagagggtgagagcacagagggcataaaagcagaggcatgaacgtgagcgctggcacttaccatgacccaggagcacataggcaccatggccctgaccacaggctataaggggagacctagtggaaacacctttgctggaggggtaggagtcacagagggtgaagactgctaagcaagattcaggacacatatctgacgtaggagcagagtttttcgagtgcacacattggcttatctaaagccaaacgcaatgtggagtcagaaatagattgattacagatagtttattaagaaagtactcatgcaacagagccagtgaccaggtttacaccggatgcctgctcgtccgcttggccaggcgggagagagaaaaagagggccgagtgcatgcctctctgatatttaaacccttgctatgtcactctgaccacggcattacctgtgtccagccccaagtggacatggtcagcatttcccccacaattccccttttagtttaaagaggattaaagcttaacagtgtaaattatctataattaactatcataaaggtgagctgggtgttggtgtagcacacctttaatcccagcactaaggaggcagaggcaggcggatctctgtgagttcgaggccaacctggtctccagagcgagtgccaggataggctcccaagctacacagagaaaccttgtctcgaacccccccctaaaaaatcataaaggtgaattacaagtagtattccctacagttatcagaatatagctagtggtttttatgtttgcttgtttgtgtgtttttgctttcacttctgtattttctcctgaaaaaataaaatacatcctcttgtactcacatagcctgttattttacctttctctagacagctaaagactacaaaaagagaggaaagagctgctgttacaattatagagtgggttttatgtatgtattgtccttttctattctcaggggctcaacatcaatgatcaccttccctagtaccaaggctgtgtgtgtgttcatgcatgcatgtatgcatgcatgtgtttgtgtgtgcatggatgtgtgtgtggtgtggtgtgtgtgtgtacatgtatatactgagggagcgccccacctggagaaccgggatagcccagtctctacctagggctcacaatgttcttacttgacatttccaaatgcaaatatgtcagaaaagtataaatcagggtgtcccaactcagattaggacagatttcctctttgtcctttcttgtcatgtgtatgttcagaaaatatatgccatttttttctctcctaatattttcccaggtgggaattttatgcacagtgcgatggagagttctatggtttttaaaattaagaaatgggactgcttattttccttgaaggttttactgcattttcaaacacattggaatgatatcagaatcatccagcagacaggggaggcatcagctgggtagtactgctgcagcagggaagatgcttcatcccaggtgactaagttgatttggttcacacctgtagacaccctaggcaagttggatggtgaaggataggtgatattcccttgtgttgatattgctcaagggaaattccccagactgccaccatcaccagcagtgacatctgatttaaatccctagttactaaattgtcaggctgtaggccagttgctggaactgtctgtgccttgttgtcttcactgtggaccatggccccattcacttgtgatgtctgaggtagattggatgatgtgaagggcttggcacagtgttggcaatgacaatattttctatactgctagtgttttgtggattgatacacagtttcttcctattaggaatgctagcctctccaccttcttcccacatcttcatgactgttttttgagctgttttccttttgaggctgataagccccagcaagacagactattcctgtatgttttctcccctttctctcttgctataattactgatctatgctctcagcttctatgttaataagggaccctgagcacccatcctatcaagatctaggcatgaacctattgtgcatagtagggctcagaagtatgggttcagttatccttttgtttaagttgcagctgctgatataaagaaaggatcaacagatgaacaacccacgtggattttatttacctgaaggggcggagatggagctgggttgtcagtcaacccaagaggagccagaaagagagagagaaagatggaaggctggaccttttaaaggaaaggttgcacatgtgcactggggtttcacgcatgcacagagtcctcacacaggctgtaatgcatggcaggtgacgtggcgatgcttagcaagttttcctgtgcgtgccccacctgttgttagggggtggggtcatccaggtgtgttgttcttacaggttttgctaagaattacgtagataggctacagagactcagcctcaggttctccatgtcttacaggctatgtctcccttgtccaatgtgtctgtaaaagccagacattggtgggggtacagcctttttggttgtcgctgccctttccctatgccattcctaactattttattttttagtgtcagggcataatgcaagattccatgaggaccactacttactaccaggtgagcctcccagagccacatcgcctttagagacaaggtaatgctggcatcgagtgactaacctcacactgtttgaaggaaccttttcaaggccagaatggaaaccaagctttgagagaattgccacttgtacacaaatgttcacagcaacactgttcaaaatagccccagaatggaagcaattaaaaggcctttcagctaataagtggataaataaaatgcagttttgtcacacaatagaatattatccatacttatgtgattcataaagcattggatagaatgccgatatctgcattcacttgggtgaacctcagaaacacagcaagtgagaggaaccagtcacaaagggtcatgtcatgggtagtatttatgggaagcacttagaatatgtaaatcaaagggacagaaagtacaccagtggttgccagggctatggccaggcgagagggaacagaagggactgcctagagggaccagaggttcctttggtatagtgggaatgtcttggaactagataggagcaatggttgtaccacataatgaatatactaatgacaccaaattgtagtcttgaaaatggctaatttgatgttatgcgaattttacttcaataaaaaaaaattaagctttgagtgccagggactccagagaccgaatgttctatgctttgagacacagaatgggctcggcactttatcgccacgtaatgaatagcccttcatgcgacactttactctcatttcccctcccattggctcctcatgcgctgacatcctcttcgtttgctaaataaatctgaatggtgaatgattgctagcacattgtgcaactgttgtccaatattcttcttgttaatttgccagaatgcaaaaaaacataaaaaaaaggcagctcatctcacaggcaggaatatatactggtcgtggagatcagccattgtgacatccagtctcatattttcttgtaattaaaatgcagcttgcctaacatcagtctgttcactggaggaaaccattgtgtgcccatggtccttgagttttgcaacattgtttccctgggcaagtgcaatcggatttttggcataactgcctcaaaaactcctgtctccatctgcatgcccctttccatgccacagagctatccttctcttaactctatgctgactttgtaacagaggcaatgttctccatgaggtccagggtcccaggcttcagcaaacctagggatcctgtgctcacactcttataaccaagacttgcctactggagctgagagtaatccaccgcttggatgaagttgatttgcccatggcttggcttccctttctacatgctggctgagcagaaaaggttgtaggggagcatcagcaggagggatgaccccagcctttgggaagacagtacccctgagtggagaggaggggcctccctcaaagctttggttcctattggctgatgctgccatatggcaacaccattgcgataaggaaaggaaggaaggaattaggaggaaaggtcaaggaaaagaaagaagatggaaaagacgagaaagaagaaaacagggcatccccactccctctgctagagctggaactaggtgcatctcaggggattttatggtctgtgccctggcacccatttctggagcattgagacaagacgagtttatgggaagaggaggaaaaggacttgatgtgtttctgttctgttgggttttgagttctgagctgtgccccgcctccaccttttgcctgttactatatactttttagaatcccaagtagggattgtgatgtaccacatcaggtttgacagatgggttcagtgagaataaggaggatctggacttctggcttaatccaggttgtacactttcaaacaataatttttgaaagggaataccaaaaacagttgaattggaccaaattgatctcttctgacacaggcgttggggtactcagggaccttgctatgtaagtcatgacgggcaaataggtatgatgcagacattgccaccaaagaaaagaatctgaagatgagagaaggtgggaaagcatgtttcttttatcatctcaactggtattctagattgcggttgcctttgacttatgacaggattttgtttttaccagttaaaaaagaagtcatctttgactgttgatttcttcttcatgatctgaggctgattctctgacttgatgggaaagttctctctggtcaagttctctccctgtatgggcactaggctgtcagagttaactcattccttggtgtctaacagccacgctaacaattagtaactactcttaaaattttgattacaacctctgaaaataactcccccaactccccatctcacaaataattgcatcgtgagagtctcagcaattctgtgacttaactattgtgtttcttcaccttcttgtcgacaacaatgaagacattggaccacaaaatgcatcccccttcctgcttgtcctgaaataggtttatctgccagtgaaataaaataagcatccatctgttggggtttatgaaggtgataattaatcacatggatgataattaattacatccctttccccctttgaattccaaaccaatttggaagtagacaaagatgtcagctacaaagcactgtatccgttgtattgtgttgctttttggagaatggtacttaggcccccagccaaataaagcttcctagtccttcctcctccaaaactaaactctaccacccatttgcatcccaaacaattgatcaccaggatgatactaaggagacatcccttctagaggagatcaaggctgtgcatttaacatttaagtcagtgacggcaggctagcccatcaatggactgtgttcagtcccatttcccagtgtcccaagtatgagtcacccctacaatggggagaaaggaagaaagtaaatggccactctatactcacctctgaaaatggaagtatcaggctgtccttagtcttttttgtcacacatagaacagagtcatcattctgactccaattccatcacaatttattggttttaggcctgtctgcttgtgtcaaactgaagaccattatataactccaatgagtctgtggagtgtggcactttttcaccaaaaccctgattattctttaccctttgggcaccaacacttatccctcaatgggcataggtttagagtgatcgatgtttttatttatacagcagcttagtgcaggccagccccaaactgagggctttccacacacccgttcctttaaccttcttgacaggtttttatgaaataaatgctaatattattgccctttcagagatgagagaattatggcctcgaaaggctaatagttttctgattttatgcaaatagcactgaaaaggccaaattaagacctagttagtctgtctgcagagcacatgcgcaatcccacaagccattgccatgggaaggttggctgaaattactgagggagattgcatccccaggaatattaatgagatgaaaacactctggtcactcaaatagcccccaaagtacattaggtagcactgcacactggttatattcaccaattccagagcccaagacctactgaaactccagtttgaccacttgtcattcacctgccttggaagtgactcctgtttgtcctgtgaggtcttgggcagattgtctgctgtctctggctttgctttccctatctgtgagagcagagtgatgataagaaccttacttacttcctagagtccttgccagttcgagataattctgcgagtctgaggtgcttagtggatagcaccaaaggtgaactcaatacaaatcagcaaacactgttgccattattctcttgggggatgatgctgtcgtttctgtctctgctataattttgaatctttctaatcttattttttttccattctgcctccttcatgcagttttaatgaaaaccctttcttggccagagcactgctggctgagagctccatttggaagccatccaggaaactgaccctgctggggcctaccccatcttccttccttggagctcctgttaattgccatctggctatttttagtttcttcaagtgtgtgctgggtgcaatcgggaaaagtccaccctgctgtgggagtggggtggtgtgagcttggggctttcatttggaaatgttttgacacttcatttgtgagggcaccagttgctggaaacttctgagagtaagcaggagctgagagcttattttttttgtaatcagcattctcacggaggagagaatcccctgttgctgcacagcttagcgcatccaaatgtgaggttggcacgggtggaaggaatttaaggatttgaaggcttaatggaaagcataaataacaaacatgcaaagcaacctatttagactgtcagctgatacgcagattggcagcggttgctctttggctcttctcatgggaattttatttggtgtaggattagcatcagtttggtcaaaaattcttccttaggtctattcccagtcctactctgacactctcttctcattttaaaacactacacaccatgcgctaacttggtatgccactgagactgacctttatcatttccaggaatggaggatgcagcctaggtctgccccatggttctgtctgtcagtacttgtttctatctggtgcttctagccctctgcttatcaccctgaacatagttgctaacccagccacaacagactccttgttcagagccatttcaggaaatggctcccaggtcctgctagcaattttatgttccctatctcgttccatccttgtttgttagtcatggtgctaggctgccacgctgtaccaaaaaacaactctattaatgtaagaaaaacacaatattcctaacaggaaaacatcaggtaacttggagcctccataagcagaataccttggaaacccctgctgccatatcgatctcaggaagacagcagtgcaacctgtgggatgtctttctgtactctgtgaatatgtgttggtctcattggttgataaataaagcttctgtggcctatggcaagggaggatagagccaggagggaaatccaagcagagatacaggtgaagaaaggtggggttggaatgcctgcagccgccccaggagcagcatgccagagcaccaccagtaagctatgggccatgtggtgatgcacagattaatagaaatgagttcatttaaatgtaagagctagctagtaataagcctgagccatcagccaagcatttatacttaatattaagtctctgagtgattatttagaaatggctgcagacaaggccggacagaaaaacctctgattacagcaaccatctgagactctgcccctacacagcagtcacccaacactagttttgatttctgtctttagtacctcccctctgcagctctggaatttggagggagccacaatctcaccatagtaaactaaacacagtccctgtctcttcacactgtgagctctcctagtccttgctctgttacctcccatgcaacctgtctcttaactgcagatcaggcttatgctttagctgtaggcatgttggaagggaacctctgacaggctgatatcccatggcatgggaatggagtattccctacacagaaaaaggagtacagattctccagaacacaaaagaatggcagatgctctctgtcataatttaaaaagccacttgagagagaaagacagcatgtgacagagctcacatggagtggtttttattagggaaaaggaaaaaggggagggggagaccagcctctggggacaggagcaacagaaaagagagacagggtagaggggcagagagactggcagagaaagaagtgagagagagagagagagaaaggaacagagaaacagagaaagagagaaagatgggaggtgggcagagcccttttaaaagagaacatagtgaatgtgcacaggacatatcctgtcagaaccctaagggcaggccagtacagatgcctgaatgctaacactctctactgtgtgacagacaaatgcatataggtcattaagtgcctagtgtaaatgaaggaaccggggctgcagaaatgaatctcacttgcttcagagtaacatcaaatgacatgagcagtgggcagacttgggtctttctgtaggcaagcttcaatgtaggatgacttgggaaccacagaaaaccattccttatatggtttaggacaataaaactgataagctggtgttctgattgtttagtatgtgaccttttggcttgtattgtgggcaaagtattattgcttgaagttttcctgggagatttgaacaaatattgactagatggtacccataacaaaataagacaataagtgcaccaaggtccaacttccaggactgataagtttattgggcttatggctggtggggagcggtagttacttacagaagtgtgggtgaccctggagcagtgatacaccaaagcatctcactcctccagcataaagggggacttacccatagctaaatagatggtgtccctgtctgcattaagcttccattctctagagactccaagacctcctgagaatacatgcagctaggagagattgctggaaaagatttactccttcctaaaacttgcacaaaaagatgtctcttgtttcctgggtatggttctatttgaacaggatgcacctgcattaagccatcatggagccaggtatggcagtggatactctcggaaagatccaggctggcctgggctatggtaagactgttcaatagcaagaactgcacaaaaccagaaaaaaaaaaaatgaaaagtgctatgcagtcacactgtcttagaactgttttagccaggattactcccagaagggaatataacctttattagtaaaaggagaaaaagcagttgggaaatgtttaaattattccaggaatgatacaatataggtaataactaatactgagctgcatgataagggaagtggtaacgcttcagaaatgctgagctgtggaggaattacatgtagacagcagggatgcacaagaggcagtagctgaggtctagactaatgaccctccctacccctctttctatgagggaatgtcaacaaggccaagtttgacagtccttttagaacagacacagctgttttcgagaggatggctgttacacttaagaggacattgttctctaaagggtataaaggtgagaaccagtctctcccagcaagcacatgtggagggatgtttcttatttctatagcttatgctttgaaagctgtcagagcttcccaggattgccataacaaactactacaaacggggtagcacagtgcaacataaacatactgcacacagttctagagctgggattccagaatgaagatgcctgcagggccaggctcactctgtcagttgtagggaaggattcttccttgcctcttcacgtcttttgtaatggttgctggcagtgactgctcttaggcacatcactccaacctgtgcctatgcttgcttgtatctcttgtgcctgtgtgcaagtttttgtcttcccgcagtggcaccagtcacactgtatttaagttccaactgaatccagcagggccatatcttaattcaatgatagctgcatgaattctatttacaagtaagctcacactcaaggttctggatagacgcaaatcattggagaatcttcagaacagttgaactgtatatcaccggaacatcccttcactaagtctctgaaatagaaatgaagaaaaagaggtagaaaagaagtgtgggtttttgctgatctctgtggtcccttaagtccaaaggaaaactccacatggattattatgattgtaggtgtagagcagaggccacatctgcagggtctgcccttgagcagattctggtcccaaaccagagagtaaatactaaacgatggcagagtccgcaaagagaacaggtttcatttaatgtgggggcaactgccttcaaagacagctagggaggattgtgaatcagcaagggtctcagactggattttaggataattgggaaaaaaagaagttgggggctggagggcacactgcactgggtggacttttagttagcctatttgcactcacagcccacctttgctccctttgacatggtgacaggtaaccctgatcttttctcaggtaattttaaatggagacaacagtgtgactgcatagttgctctgagaatttagcagtcaccgtgtggagagtcttaacaccacagctccagcatgctgctcacataactggggagttagcattagagatcccataacttcaaacagcctacccaggctgtgaggcaggatagaccaggctatgctactgtagcaacccacccctacatcccaatggctcacactaccagggtctcgctcctcactcgtagaacctgtccattgtgcagtgaatagggatcagctttgttccagccatcacgtgaagcatcactaactcctattgcagagcaaggagattgacagtcttacttttcaactctcccacctagaaatagccagtgttatttcttaccatgtcaatgggccattgtaagtcatatatccactctgaatttcaaaagggggaatgcatgtgtacacaagaaaaaaaaaaaacagaaaatgtatggccaacgactctaatggtcactttgcaagctcatccaaatggggccagtttgctaagatattattctcaaatcccaactgttcattggaggtaaattataaaggaaagggggtattgaataattaatatttccattaagtagtcttattggatttaaattctgtctggtggttgaatgacccattaccaaggtctgttcataagttgccggtgttgcatttcttaacattgaactctgtctacatcattgctgtaaagggccagtttgggccaactactgacttgctaaacattaatatagaatactgcacaacagcagcttccactgcccatgccttcatactactctctgctgtctaagatgcaaaggtaagtaatacagatggaaggctgctaaaagacaaactaaataatgagctaacaaggtcttcaaagtattgaactagaacccctctgtctggcactgaatcagaggctgagctctgatgaacttggaccatccacccaaatcatattttcatttgattttcaaaatctgaactgtgaacacccctatgttcaagcagtgacttacatttagaattgagaaattccaggaacctggaataggtagaatcataggaaactatcaacaagtatgatattctgattattcagtggcaaagggaaaggaaaatgaggatgatttctctatcagttatcatgccacattgatcagtgtgagcttcccccaccccaatacagacatcaatgctcttctacgattcgagtgcactgtatgagtgtcaagtgcttgtcctgcctcagaatcaacatgaatgaggtacacaccgattcatggtgcctgtccacacctatgtgaggcactgggtgaggccgtggccgcaggcttctcaggtaggtattattagggtagaagcattagcaatggaactcagctccaggttccaaaagtcagtgcaaaaaattcctaggactcctttgggtcctaggtgagactgcaaggcatgtgtccccctatgcaaaatgagagtgaattaggatcaacaatgatgagtcagggcaagctttctcttctcccttccagtctccaaatctgttctttgtactagctcagcattcctgaagcactatctcttcccttatcatgcagctcagtattagttattacccatattgtatcattcctggaataatttaaacatttcccaattgcttttgctcgttttaccgataaaggttatattcccatctgggagtaatccccaggcaaactggctaaaacagttctaagacagtgtgactgcatagcacttttctgtgctatttttgtttgtttgtttctggttttgtgtggttcttactgtagcccaggccagcctcaaactcaggatctttccaagagtatccactgccatgcctggctccatgatggcttaatgcaggtgcatcctgttcaaatagaaccatacccaggaaacaagagacatctttttgtgtatgttttaggaaggagtaaatctttcccagcaatctcttctagaagtttgctcttcagctctcattagcaaatttctatcacccaagatgaagcccatcattgagaagaaagaagacacctgtttgctgggactggcatggctatccactgggaagagattacacacacagtaaacaggacgttcttactgaaagagggaaagcgaggtggctgatgttggtcaggaatttgttgtcgcctactcatctgtgcccctgatccatgccactggtgggatgctgctgatgggcagctctggtgtcatcgtgttgattattctgtggtaatcctactttgcataagaatcatggccaaggctccaccagattttgtgctcttgcatgttcaagtctcagccatgctcttctaattctgcctctgataactcatgcttctgaggtgtcactgacttcctgtctctgttatcttaagtgcctgtgcatatttcccaagattcctgcccagccctgtgtttagttgtacaacccttgactcattttataatgttcattctcgtggtggtttaaatgagaatgccccctaataggcctataattttgcatgctcggtgcccagttaatgaactgtttggaaaggattaggagatgtgaccttgttggagtaggtgtggccttattgaagggggtgtgttgctggcggtgggctttaaggttttaaatgctcacaccaggcccagggtctttctctctgcctgttgcctgtggatcaggatgtaaagttctcagctacttccccagcaccaagcctgcctgcatgccactatgccatgatgatgatagaccaaccctctgaaactgtaagcaaacctctaattaaatacctccctttataagttgccttggccatggtgtcttttcagagcaatagaacagtaactaagaaagctctccaggtcatttcagtgaagtctttcccttaacatagatttccctccttcaggactgggccttttatgtgactgtcattgccacttttgcacactgttgtattattttctaacaggcctcttctccatgcatctttccctcttctgaacagccatgctggactcctcttcactctcccggcacctagaagtgcctggtacaagacacacttaatagatatttgatgaaggaatcagtgcttgagatttgaggccaagtgatggtgtcagaatctattcctgccttctgaagagaggctaaacagaggaagataagggaaaaggtagccaatatgctttctggactccccagtcatagagaattgttgtgaaataataggtaaaggggtggatagaatatgagagatacatttatccatcccctgctggaagagtaggtgaatgaaatacaggtactcataaaaattaattctgcattatttaaacacgggcagccctcggggtgaaaggaagttttgctgcacagcagatacagaattctgtcttatgaggagctgttgtggcagaattctgccataatgaaagtgctaattatccgaacaagacttaagtccaagctgcaaaagctgcgaaagaaatcttctgcaacccttgagacacttagttagaggtgtgattgacagtagaaagtggtgcagtttcttcattccactaaggcctaggagctgctcagccaagctgccaggtcgtacttagcctaccagcagggtggggtgtggtctctggagctatgcagctaacagtgctgatgaagcacatacaagaagagcctgggccaggtctaactttgggctttctgttaaaggtgactacaggcagaataagcaatggctggaaggaatgatggctgtaggagttcacaggtgggtaggggacagtttaggaacataaaggatgcaatcctgtcagttaggggattgcagttctgaggcgcctgtaaagtgtgtaaacaaggaaagcaaaaggaataataacaaacctcatgtgaagaattagttgtggcaaaataaggacactgacatgtgaaggtaatttatcagcagctggggccaaaaaataaggccaccagtgtggtagaaccgtacatcggataacttagaattgaaagggaagagactgcctaagagcttaatgttagagttagatgattaggcaatctcagccctgccattcatcaagtacacggttaacttctgatcaccagtgtctgtaccttataatatagtgaaaaggacagcattgtgttagagggttctcagcaccagtaaagaaggtgatgtttacaaagtgctaggcagacacagcccgtgattactacactcggttgatatttatttttactcttttattctggatagtttggtttcataatttcagattcatttggatattcattttttatcttagacctagtaaataaaaatatatatttaatatgtgtggagctatattgttcctgtccaaacaattcacgtgatttttttttctggaccaggaaatcagaaatatattctaaaaatgaatcaagaaaataaacaaattttacttaccaataagttcataggacatttggtcaacgttacatgaattaattgttgactgttcattattggctttacaggcatttcataccaatttctatgctatgtgaaaaaaattgatcatgtctgcagttactgcctaggtaaccagtaggcagctgaagatgaacttcctctctatggggccagggaacacaagagtcaactggatcacagtaataataacatgtcagtggcaaaagaaaggcatcttttaaagaacttttaaaatccttatgttgggggctagagagatgtctcagttgttaagagaacatactgctcttgctgagtttccagaacccaagacaggcaactgcctgcaacttcagctctaggggattttatggcctgttctggactccatggaaggagcttgaagcagttgatctcattacattcacagtcaagagcagaaagcaatgaattaatgcatatatgccagtgctcagttctttgtttttgttttggtcactcatacaataagtagtttactacttagggaatggggctacccatggtggatgtaccacaaggccacccaatcttgattatccttcactgaaactcctttcccaggtattttagatggtgtcaagttgacagttaaaaccaaccattacagtcagcaaccagctatatatcagtaaaaatggtaacgattatgagtgttacaaaggaaaaatatgagaaggtgaaaataaaaaaaagcataaataacaggagaatttagcccaggaagaggaaaagggctagggaacgtagagatgctggtgatctgaagaatgagttggtggatcagcaaggattctcaaaaaatcacaacaggaatatttcaggtaagtggctatttccaaagatatgagagtttctaagaactagcaagataacaagggatgtgcagcactccagcactaggaagagtggcctcagcattggtcaagaattctttgctgtcttcaaaagggataggcacttgtttattatttattctgttcattccacaaagtttccatgagtccctacaatgcaccagaatcacaaagacacagaaatagtagctcagggaagagctgtgactttcagtatggagaaatacaatgggtctaaggagttgccagaaggagaatgatcacaagatttcattgtcatttgtttcctctgacctcctattgtataaatgagtttttctctgggttgttagctcacaaaaaatgacatggagacatattattaattatgaaaacttggctttagcttgggcatgtctcattagctcttcagcctacaggcctagaatatctcacagacatttttgtgaagcaaaaaggactgtcccaccttgtcttcacaaagtttggcagtcacctccttttgtgtcctgcttgtccgatttggatagcatactgtcagcaatcaaggcaagggcaatttccggtggctaactttaaagactttatcttattatttatttataaactatttttatgaccatctatacccattttcttctcttttttaagcctatacacaatttttaaacacactgtaacctgtttagagggttttctttttcctgtctgggtctgtcttcattgagcatctgcagcattctctgatcacataagacaaatcttaaacttctgtgtcagctgcctttcactcagcttaacacatagcactggtgcttggtgctggtggctggctccagcccacaggcctctctgtatgccactgagcctacccgagagcagtggccaccaggaaactgcatttgactccatgttccatactttgtttccattttttaaattaagctttctcaggcttttagtggatatatgtggtcccacattggccaccatatgtagatggatttttctttgggctgccagctcacaaaaaaatgacatggagacttattattaattatgaaaatttagccttagcttagacttatatcattagctctcaaaacttaaattaacccatatcttttaatctgtattctattatgtggcttggttacctttactctgtactgcccctcctgcttccttaatgtctggctttcttcctctctgagtcttctctgtccccagttcttctaaacctcttcctgcctagctaatgaccatttagatctttattaaaccaaccacattgacacatcttcacacagtgtaaaggaatattctgcaacattatgtaactttttgctttgctgatcccaaacaaaggtggtgcaaggaatcccattggtaaagtccatgcaaatcagactcctggtggagagcagaatgaaagggagtgatggtagagatataatgataaaatagaaagtatccagcacaatactcattgtataagtggaaaagaaaatgactgcagaacaataccacagagtcgggacacaccaagaaaggaagcagaacattctaatggtccgtgacaggaatgtcacagaaattccttcccaaatgagctttcttgttattgggctctcattgggattagccaggtgaaatggcaacaggaggtcagggacaagaatttggaagatggctccttcactttgacagaggagtgaccatgttcagaccatagttataaacagaatagagggctcagctgttaagagcatttttgagagcctgggaagatggctcagtccgtgagaacactgacttgctcttccacaggacctgggttcagttcccagcacccacatggcagctcacagctgcttgtaactccaggatccaacactctcatacatacgtacatacaggcaaaaaccacaataaaattgataataataatagtaataataataataataataataatataataataaaaacacttttgctctttcagaggacatgggtttgattcccagatctacatggcagctcacaactatctgtaactccagtcctatgttatctgacacctgctctggttttggcaggtaccaagaaggcttgtgatgcacaaacattgcaggcaaaacacccataaacaaaaaataaaatatagttcaatttaatttaaaataaggaggatagagttcatgaaagataaatgaatggaaagggagaaaggagggttgtcaagtggcttggaggtgaagttaaaagacacagtttgggttcagaagacaaggaatgttgagtgaaccagctcaggataaagatcttacattagacaagagtatcctgagcttgtcctcttggggtgctgacttctgatgtgagggtattctcagagttgtcatggctgatacatatcataggcctttaccagacataatttagctgatgttgaaattagattaccatttttgagtctttcccctttatttatttagtcaatagatatttatcaatggtttatatattattttttcatgtgtaatttttattttttgccatttttctatttgtttttttattttagaaacaatcttattttacatttctatttcccctttccctcgccctcccatcctcccatgcccctcattgatctccctcaacccacccccacccactccccaaggatagtgaggccctccacggggaccatcaaagtctgtcacatcatttgggggagggcctaggccctccttgctgtatctgggctgcaatagtatccctccatagggaatgggctcccaaagcccatttgtgctctagggataaacactggtccactgttagaggtcccatagactgcccaggcctcctagctggcacccatattcaggggggcttcatttggtccagtgctggttccccagctttacagctagggtctctgtgctctcacgaggtcaggttaactgtttctgtgggtttctccagcaccatcttggctcctttgctcatccctcctctccctctccacaaatggattcaatgagtatggctcagtgtttagctgagggtgcctgcttctccttcaatcagctactggatgaaggttctaggatggcaacccagatagtcatcaatctcattatagaggaagggcatcaaaggcagcctctccaccactgcctagattcttagttagggtcatccctgtggatcctctaacatttcccctgtgccagacctctttccaaatgtatactggctccctctaccaaggcatctcctttcttgccctcctctattcctcccccgtctcagtcctcctgatctctcctgttctcctccccctccctttctccccctctccccttcccacatccctcttctctccctcccatgctgccaattgctcaagggttctttcccccctccccttcttcaggggaccttgcattcttcttttggggtccccattttcccctagtttctctagtggtgtggattgtaggctgatcctttggtctatgtctaatatccatatatgagtgagtacatatcctggctgtctttctgtgattgggttacctcactcaggatgttttcttccagttccatctatttgcctgtgaatttcaagatttcataggtttttgttttgtttttttttccgctgagtagtactccattgtataaatgtaccacattttccccatccattcttcggttgaggggcatctaggttgcttccaggttctggctattacaaacaatgctgcaatgaacataggtgaacatatgtccttgttgtataaatgtacattctttgggtatatgcccaagagtagaattgctggatcttgtggcaggctgattcccattttcttgaggagtcaccatactgatttccaaagtggttgtacaagtttgcactcccatcagcaatggaggactgttcctctttctccacatctctccagcatagactgtcattggtgtttctgattttagccattctgacaggagtaagatggtatctcagagttgttttcagttgaatttccctgatggctaaggatgttgagcactttcttaagtgtctttcagccattttaaattcttctattgagaattctctatttagttctgtaccccactttttaattggatttttttggtggctagcttcttgagttcattgaatattttggaaatcagccctctgtcggacgtggggttggtgaatgtcttttcccattctgtggcctgccattttgtcttgttgactacaaactttgccttacagaagcttctcagtttcaggaggtcccatttattaattgttgatctcagtgtctgtgctacaggtgtaatgttcagaaagtggtctcctgtaccaattcgttcaagggtacctcccactttctcttctaagaggttcagtgtggccggatttatgttgaggtctttgatccatttggacttaagttttgtgcatggtgatagatatggatctatctgcagtcttctacatgtcagcatccagttatgccagcatcatttgttaaagatgttttttatcccattgtataactttagcttctatgtaaaaaaaatcaggtgttcataggtatgtgggttaatatcagggttttcaattctattccattggtcaacctgtctatttttgtgctaataccaagctgttttcaggactatagctctataatggaacttgaagtcaggaatggtgatgcctctggaagttcctttattgtacagggttgttttggctatctggggtttttgtttttccatataaatttgatttttgttctttatattttctactgtgctggtcagaggctgagacatacatgatataacctgtgtttaggaagaacatgggctaagcaggaaagataaccatgcaagaaatgcctgtcatagcctatgatgtgtttatcatatgtatcctatacagagaactgagaaccaagagactaagagccttgcttagactgggtaagaaagtcagggaacacgtccccaagctacatcttagagaatgagtttcccaggcagaaaattgagcagaaggacatcaccaaagtgacataatttatcaattcaactattaaaaaaagtaagccatccttgtgtcgcaatcattcaccataataatgtattcttgaccatctcatctctagtaccttctgggtagccaacccagaaacacatactcctttcatcatgaatatacagtctgaatatttctgaataaggagcagaaagcaccgatgctcacaacttgtaggttccctttctagtttcctgtattctacagattaaacacacaaatctaaagatttgatgataagatctatgtgtcagtgagaacgtgccttatttatctttctatgtttgggttacttcactatcatcccatcttaatttggaactatcataaatcaaagatgtatttaattatatataacctatccaaatcatagtacactaaggaacatcatatgacggggagctacgactcaccttagatagtcaatgatccatggcagtataccattatacatcattagtacagagaacattcagaattcgtagtagagtttctgctgaaaatgtatcccttgcacagctttataaactcagaaattcttcagtggaaccatcataatcctgagcatgcctgtgttgaaagcatattctggactcttagcctgaagtgactcatcacatcctttaatatactcttggcagaagtggccctgtgcaagtacaggtacaagagacctggtgagccagctgcttctgaatgattataagatgagaggacatgaacatttggttgactgttagtttccaattgactcaggggatttctccagatatagccagaatcaggaaagggatggaattcttgaagaggaggaagagagaagaatatagaagaggctaaagacattgctccattgtgtagcatagcagaaatagcccatagtgaccttttcaacctcctccagacgtgaggccatcagaggtgaaatatgattggaagcaaacctcctttgctctttcactcatcttccaccacacataaagagaaccactggagtggggagatggttcagcagttgagaacgagtgctgctcttacagcagtcctaagttctgttcccacaccgatattggtatctgacaactgcctctaacaccagtgctgaggattgtgatgccctcttctggcatctacaggcacttgcattcacgtgcaaatacatacacactaataaaaataaatattaaaatagagccatgggggtgtgaagagctagtcactgaattctttcatctaagttctgtcattcacttgccgtattacatattgggaaagattcatctttgttttccataagatgggtacatggaggtgtgctctctgtcccaaggagacacaaagaccaggccaagtgcacaaggacatcctttggggctgtaagcgttcctgcagatacaaaaagattttcttgctttctgttgcttctgcctgaggaggatattttttcccagggcatcaaaatataatttaacatctgccaatgtcctcaaatataaccaattctgtgaaattctaccaatggtagaataacaaattagctcaatataattttctgtgagaacaaagagatataattagaggacactctgtggcttcctgaggtgttatgagggaaagtggggtggaagtatctgtgttctgtcctcttcagcacagatagtctctgtgctgttactgtcttcaccagagatttttctgcttggcgacacggcactattcctgaaggtgcacggcttaggtacataaggcaacctgttctgcacttcttcaacctcacttccttgtcacataactaaaaatccacttgtttactttcaaatacacacacaggcaggaggctggagaaattatctggatcatgctagcaaacgatcaggttctttcccaaagcccgtgctcctttttgaaacagccatataactgaaggtattttgactcaacgtactgagaaaattacctttgtctgtgtgatactttatattgattgacgacttgtcaggctctagaatcaccttggagacaaatctctgggtgggtctgtgaggaattttcttgattagattgattgatatgcaaagattcaagctaagtgtgaataacaccatttccccagctggggcaggtggtggtatacttaaaatgtaaaagcaaggggagcatagttttttacctcctggctgcagatgcaatgtgaccagctgcctcatgctcctgctgccatgcttttcatgccagaataaactatatccttcaagggagagtccaaataaacctttctttccctaagttgcatttgtggggtgttttgtcatagcaacaggaaaagtaacaaatacagtttcacagttttgtgtttctgagtaacttgtgttcggggagggctggtaatggccagcctaccaatgggaccaatttggcagaagtttaattttgtcaagcactcccctattccttattcttcattttctctgtgtgtcttgtttccatctctcttttgaaagctagacatttctttgcttttgtctggatgatagagtatgtagaagacactgttctaaattgtgcttcctgacaccccaaaaactagaggaagaactgtgtggatgcatttctagggtatctgtcatcagagcatccaccacagccaggtacaagtgccattctttcttaagaacttcaagcctaaggtgagttgaagagggttctacagagtcttgtaattatgatgcctccctctttgtggacatgaatttttctctccacctgagtggcctcagcttcctaagaggcagccatgcctgccctcaaagtgggccacgccaagtagatgattatttgcctgggaagaaggaggcgaagagaacactggtatttctgcaagtatagacagcctgacagccaattttggagtctgggtgacatttcaaattggtaatgctcctaattactcaagccctaggaaaccatatggaatgcagccaccactctagacttaatacaagtgagcacggtgaacccattactgacagcatgttctcctggagtaatggcaccatgtctgtgtcagcacagcatgatattgtagttagtgtgtgtgctcgtgtgcatgtgcacacacacacacacacacacacacacacacacacacacacacacacacacgggcacacaccaagttaaatgtctgattcaaaactaatagccaaagagactaagaataaaagtcactgaaggaacaaaagttaaagttatttgaaatttcagtgaataaaccatgaagctttgcttcagcagtgctggggagggggaactcagcatccatggtccactcttttccttttaagacacaggcccaagtgtaggcccctctgcccggagaatgatgctttttcttacatgaactccaggtctaaatgcagagaatagaagagagtttctagcagttctcaacattagggcttgccctccttccataagaacttacccaaccttgtggagtgagcgtggttcagaaacatatgccctactttgggattctttaagattttcccaccatgcgaggcttgacatatgtaattccacacatgttagagaggatttgaattttgctcatgctgatgtgggaagacaaactcctcctcttcttggccctaagcattcccaaaagcaacccttattacaaaaagattgacataatagcggtgataatttgagaagtacatgtgaaatgccagtgttttatccattgttacattatctagtccccacggtcaacctagagtgtagctgttattgacctcatttaattttaatttcattaaaagcagatctaagagattccccatgccaccaagaatcagtaccagtcagtacttacaattaagtctaatctctgggctcaaagctgtccttggaccaagagccaagcacctgttagttttgtttttcctccttctaggttgttctagatgttggctgtggattggaaatactgttatttttgccatgaaagctggagcaaggaagggtaatttagtgcaagccagctcagtaacatagtgtgctgaggtaagtgcttgtgtttaaaggcagatattaactggtttttgcatgctttagggtaccaaatgatgtgaccttctagtaggttatttagaataatatatatatatatatatatatataatataaaaaagaaaaggtataacctaaaatatatatatatttaggttataccttttcttttttccccattggaatgttgctccgctagagcccaacttccttgtagtggttgctagaaaacaattgttctttaatttttaaatttaatttcatttaacattttatttaatttataaattaaaacagagcatggcttctcctttcctatctcccttatgtcaggtagtgcgggacagaggatgagtatgtgtgcttatcttaaatgatccagcaggtgaagaatgatatctcaatggatctagattcctttcatccccttaagtactgtcctaactgtagctacatgggggatgtccctccctccctctctctctctctttatatatatatatatatatattatatatatatatcttattgggtgatgaataaaacactgattggccagtagccaggcagaaagtataggcggggctacaagatgagaattctgggaggaggaagacagagagaagctgccagggagatgccatgtagctgccaaaggagtaacatgccagattacaggtaagccacagcctcctggcaatatatagtttaatagaaatgggttaataattaagagagagctagccagcaagaagctgaagccattggccaaacagtttacagttaatataaggctctgtgtttatttggggcaaaatgtctatgggaccaggtgcaacagaaactgtgtctacactacatcaatttcttaacctcattctgcattttcaatgagtggtggctacagcagtgtagttgcaggaagagacggtatctatgcctggaggaacataatctgatttgagtctctgaccagagaacagagcaatacttgttttaaatatctctctatcattagggaatgtgtacaactatcagggttaaaaatcagagtgggaagtcaggccatgaaggctttcagcaatgtttgagcataacaaggacccagtcacagcttcagagatgtgtgtaaaatatatgattgggggcaggcctgtcattcactcatgaaggaggactatgttataatgagggataggatgatggacaggaaagcttggctgctgcttcatgtgagcataatgaaactttcctccattcctggaccactgggaactttcggaaatcattagtgtgagcatgagtgattaacctgatgggactaggagggcagagcctgaggaagcatggcccatgtggagggaagcctgctgagtcacgtggctacaaggctattgcacttgcctttcttcttgccacatgccctgaaaaatatgttttcagtccttgcttcatcaccacttcctaaaagttgctttattaaatactggctatatgcaaaaaaatatatacagtgtgtgaatagtaattcattacccattttaagaaatcagccatagctagttgtggtagtgtgtgcctttaatcccagaagaggcaagcagatctctggaagtttgaggccgggccatccaagatgattatttttgatgagacccccatctcaaaaataaaataaaataaaaatcaaccattagcattttctttaaaagcctgtatacctcaccctgctcacagaagcttcctgctcagaactattatcatgaatttttatttagcatcctcttgtttggtgtaatttttaccacatgtttttatcccttaaagcaaatcatttatgaatgttccataaattaagccatggatcaactagatttgcttttttcaaccaataaacctttattgatactattgtttatttaatgttcattttaaatcttgtttcttgtttaaatttccagttgttcatatgttgcatgtgttgcatagcctctccttgtctgacatgcctcaagctgatggttttccatactgttggaaggctctgatggcttccattgcaaaagtcttcacatgaaaattcttctggagtttcttggtgtgtacccaggaataaaatggttggctgttagggcatgcaggtctttcaactttggtatataatgccattgtttttccagtgtgtttatatcacattttactctccaggaatgtgtgtgcatatcattgtttaatacctttgttgcactttagtcctgttaaacttagtcatttctaccaagctggtgctatgacatcctacttaaggtgttaatttgcatttccacttactgatgactatgcttcttggcttttgtgctctatcttctgcaaagtgcttgttcatagattttgacaacttttcatgtgaataaattctaattcatctgtggaaataagacctataacctctttggtaaatgtcttctctcagtttgtacttgatagtcactccttcttgatggtcttgtctttgaaaacataggagatgaaacttgcgtagagagagcctcgagcatggaaaaacccttctgcttgaatcttaacatgtattcccaaggatggggcattgaagtctcctgtggtgttctctctttcacatctttgttccactgtgtccttcagcgctgttgctgagtagtgtaggagaaatgataaagattaatatctactcttaactcagactttccattctaataaggaattgagcctatgcatttactgccagcaatacccctcctccccagagcacggtgcaaataatttaggtttttctggtttttcatacaacttgctttctcatttacagtaaagtttggtgaggacagtatagttacctttcgagtcttagccttaaaaacctagcaccttcctttgcaacgatttaagaaaaaagaaaatagttagctgaagctattcttgcattccccatccagaatctggtctccagctccagcacagattcccagtaatcgccagccttctctagaaccctcaatgtgattttacttctgcaagtaaattctcattttccttaagcgccttagcaggttggttgccctctctcgggtgagcctatacgtggcttttctttttcactcagtgtgactgccacactgttgtaagagctttatgcaagaagctaatatggaaaggaagaaagaggaaaacaaaattttacaacatttttagaaataatttcaacttccagataagcttcaaaaccaaaaacaatttcaagactatcccaacaactttagttggttcacctatttatgtttgctccattgacttctttgttctttgttaccataactgcatacacatgaatatttgtatagactcatgtaagtatgtgaatatattcatgcatataattcatgtgcacatgtatgtagagacacacttatacacacacacatttaaaaacatacagacctgttttctgtgggtcagttacatataccataagcctttgtctaaatagtttagtatgatatttcctaagaatgaaactctacttttacataaactaaagaagtactaaatttaaaagcaatagggaagctgtaatgtgaagcttgtatggagtttcaatgctggtgcttattcatggagttagtggagcccccagtatgaaaggagaggctgctgccttgattgctgagatgagaaggaattgcttatttgcctctttcttgtataaaatttccagagatacttgatttttataggactgaaactaatattcagaggaagtttgcagggggagaggggtggtcaagatgtacagccagagggagagataacttctaatgtcctatagcacatcagggtaactagggttgataaaaatacattgcatatttcaaaataggtagtagaaaagagtgttcctgacataaacaagtgacacatttgacatggtggatgaaccagtagtccacatctggtcattgtataatatacacatgcattgaaataggtccctgaactctatacatgtgcatgattgtgtgtcaatttagaattgcagttaaaatttaacatacttaccaaccaaaataaacgcttaagtcatattctatcataccctaaagtaacatggcttgcggaggaccctagtgttgtgatgtatttttttctgtgtactgccagggtgaactagagacagggatagctttctggatgctgtcagaaatgtagggagtccttgaaacccttgttagttggtctgttctgtctcccgggctttccctgcatgtggtctaaacacagactggttaaaagtgtattcagagctatgggcacctagaatcttctcaaaggatatgtgttaaagagtccgggtcttcctgctgtgtaggtcagagccattccctgtgggctgggtccctttgccctgtgagggtgagtgacatcagttcgtggtttctgctgcttctcccagctcttgtctgcatggtttgtggagggcaaaatgtgattgtgaacagcacaaaaatgattttgcctctaagaatagactgatctgggagcccagcacacagtgcgtggtgctcctttcgaccttttcattatttcgtaattgaaacagcagacatttaattctttcctctggagtcttcattaagttgctcagaaaagataaaattgcaacaagaaagaaaaacgtacaaatttaacgaccattgctcatgcctggtttcttcctcacataccaggcttctgggctttaagtaaacagaatattttcaaattgcatagaattcaatatcagctgcaattactggctcagcccgattctgtaagggttgatcctcagtaggcagtgatgtgaatgactgctggctgggggtgcgtgtgttgagttgagtccatgttgggggtttccatgaactgaggtgcacctatgcgttctcactctggatcccatgtgacatttctgggtcagaaaaagaggtcatcccaatcaagggacaagacagagcgaaagactttaatgggtttgaaagccatgaacctgctcagctcatgctggcaaatagctcttgttattttctttaccttccccatcttcctcctcctcctcctttttctttagtatggaacatgaagctaaaccttccagctatatgggccaattggaaaagaaaaggcatgactcaaatttatgcatatatatatatatatagtcatatatatatgactatatatatatatatatatatatatatatatatatatatatatagtcaatgaaggggctattgtatcattcaaaattgaacatgtcttaacctccagctgatgaacaactccttgaagatctagcaggatgaggacagtaggaatgagcactcctgacaatactacacattgttaccaacttgtagcaaagttctctctgtcactcacacaacattcctgatcattatttgtccccttaacaactacactaaaagtgtgcagttcttatgtaaccctcgtttggacaattgtaaagaaataagacctgaactaggtcctctgcatatacattataattgaatagcttggtgttcttgtgggactcccaacaatctgagtggagggtgtctctgactcgtttgcctgtgcttaggatcctttttctcctattgggttacctcatccagccttaatgtgtattgtatattagtatgctatgtttggttgatatccctaggaggcctgaagggaaatggaggaggagtggatctgggggagaagggaggtggaaaactgtagttggggtggagtatatgagagaagaataaaagagaaagaaaactggaaggaaagaaggaaggaaggaaggaaggaaggaaggaaggaaggaaggaaggaaggaaaagaaaaaaagatcaagtatccctgtagcatgagtgtggtggtaataaaagcagggagatttagaagaagcattgtggcccactgcctctccagaccttcccaattcatcatcgggggaattttttgttcagtatggtaccattggatacatatgactatttaagtgtaaatataagtgaacaataaatacctagtttccaagtcatttaagaatttctactttttaagtagccacaagtagctaatggctatcatgttgcacaacacaggtatggggacgtctttccaatcttcacaaaaattatgttgggctgcgctgatagagaggttgatatggcccaactgcacctatctggcatataatggccaatatctgctcactcgccagtcatgggtaaagtacacatggcttgcctttggtgaggcaacactttcccaaccctcttgctgtgcattttttattgtttaatcttcctttatttgtgtcaacactgcttttctattgctaagacactacgagcaaggcaacttataaaagaaattgtttattaggggctcctgatttccaagggttagagtctatgttggcagagcaaaggcatagcagcaagaacatctcagaacttaacatcttagtttgcaaatttttggaggagaggggtgtagggagacactctagccccgccccaggtaacccagacaggtgtgctggaacaagcccatgagggcggggtgagggggaagtctaaggtgatgtagaaaaggcttcttaagggaccgagaacacatggaccctctcttctgctggccctggtccctgctccctcctcttcgctttggcctgcacttggctggtgtatccgaataaagaaaccttgcccgattgcctgctgagtgatcacttagcacatggtgcccaacaggattaagacttaatagtgtaaaacaggggggactgagaatggcatggatctttggaacctcaaaaccttttcccatttacacaccttctccaacaaggccgtacctcctaaacccttcccaaattgtttcactagctgaggaccaagtattcaaacatatgaggctaccaaagtttgtatttgggactctgtcactgagcaaacttcctaagaaacagagtttagtagggacagctttccactttcaccagtagataagtgaagccagccaggtgggtttggggaaagggaagaattaaattgcaatagagttgaactaaatggctcagccagtcccatcaggagtttttaagatgggttggcccttcagagttgaaccacctagaggtaagtggctttttattaaatacttttatgattaagtcctcagaaggggtgtggtagacagaagtttctgtcccacctggtcccacagccatttagtcccaaataaacacacagaggcttatattaattatctgtttagccaatggctccggcttcttattagctagctctctcttaatcattaacccatttctattaatctgtgtatctccacatggttttggcttactgatgatgcccaagtctgttgcttcttcagcagctacatgtcatctctcttgagactcgctctctgcatcctttcccagcattctcctagtctggtagccccacctacacttcctgcctggctacatcctgcctgttcattggtcaaaacagctttattcatcaacaagtaagagaaacatatattcacagcatgcagcatatatcagggtataaaaaaggtagtcctctcaggatgaaggcaatacctacctagaacatggctcatctgggaaccaccatatctttatcctcagctgctggaccatggatgcctcccttgcaatagaaagacctatgtggtccactacagtctaatctgtaagttcaggttccggattccatctttggggtacagaaaggaaactgatggtagatatacatgattttaaatcaaaggatggagtgcacatgatggatgaatggatgacactaaaagcctagcagaagttacaagataacacagattctttttccatgagcaaaagattttagaactgggtatggtacttgactgggtgtgttctgtacattctgtgtctcacaaaagcatacagcacatgccagatgcattccttctttatcctgacttgggatacaattggctggcaaagaagtgaagttcttaatacaagaaagtgagtgtcaaatgctcatgcatggtagagctgggatttccatgccaggagagaggaattggctgggctgggctgggctggttaagggaaaacttagagaagaaatgtgacaggaattggttgctgaaggatcagaattagtagtttgactctgcatcttctgagatcctactcccaccaaaaaggttttaaaattcttttatgttcccataggattccccatcttaaatatgttgatcatctcttcatacatactttaaaagccaattattggaaagtcacttctaatttttcatcctgaatactaaaaatgcacaccctttgagatcttcctacatgactttatcctgacttcacctctttgagttcaggtttttctccaataacttcagtgcctccagttgctagcttctatttcttcctcactctcccacagacaccaaatgcatgagtcacagaattctgtccagcctgtcaacacttctcatttttgcactgacaacagagttaaagggtggcaataaggaacctgttaaggaaacaataataatcatttgcatagctggtttcagaatttaggaagctagatttaggaaggtactggtgcagacaacaccatgcccacatcacagaaccttactgttttatctagaagctagaatatcacttgagagcaagactgtatggggttatactctgtacctacactctcatgaccatacagcgtggaaggatactgttttcttgttgctattataaaaaaaaatctacagaaaccactgggacttaggacaatatagatgtgttactttatagtctaggagtcacaaatctaaaccaggtcttaagaggctaaaacgaaatgctatgttcttcctaagggctttaggaaaggatccatcccctgtctttagaagcttggagaagcatttccctggcttctgcttcagttatcacattttctttcttgactcagattctctgtttctctcttataaggactcttgtggtcacaatgagctcatgcagattgcataatccagtgtatttccccccttttaagatccctaacgtaattacatctgaaaaccccctcattatagaagtcaccatgcagaagcattcatggttagattgtggacatctttgggaagccattattgtgccttccacacaaatgacctaacctttatcttctttgtcgtcttctccagtgaaatgagagataatcttagataatcccccataaggacattttgaatttggtgagaaaaatccacataaatagcagcatggtgcctggcattctccagctacccttattgccacggtggccaccatcagtaccattgtaggcatgtgtgacattggatctaagcagcgttgagcagggctttaccaagagggtgagcaagagaagagagctggagcagcagcaagcctgcctccctgaagccctaagtcagagcctttgacctgtgtgaggatttctagatcagttcactgggcttctgtatcaacttgagctttatttaaaaagcaaagagtctgaagaacaataccaccctttgacctgaggtctggtctccctatttaatgagggggaccttagagaagctaaggaacatgtcctgacctatagtggtctctgctcttatggtctcaatgttttccaggttcatgtgctgaaactgaactgaactggggagatgtgaagtcaccttttgggaagtgagcgatcctgaggttgaaggcatggattccagtctaaagtcagggctgaaagactcaagccttcccatatgcacttctgctcctctcatgggcaaggacagagactgtctctcttgctctttctatacctcatgccaagtaaagacatcagcatgagggataggcttataccagaaacttagtgatggccttctgtatccagaatgtctcagtctccgtgacagtaggaggtaaaattttactcttataaatgtcccagactcaggcagtttgttttagcagcacaaactaagataactctgtggcagtgtatatgatcttaatataaaaatcttagttttgtggggggttttttcaggttactttgcagcttctgaaatcctcttttattggttgcagggctctctcagcctctatctttttccatcttcttggaggtttctctccatatgctatcttactgctaaatggccctattcaaggacagtctgattctaagcatttaaggagagaagcaacctgtttgtggaaaaggcttggttaatctgaagtattttcttagcacaacagccacacattttagggcagttgtgatttagaccccacgtgtccttggcaagagaacagagacagtaggacaggctgttatttcaattcgccacatgaagaccacaccactaagctctagccaggcctgaaaccaaaatgtgtgtgggtggttgattgctctctgctaacagcttcttggaacccctctgcccgagtaccgaatgcatgaattctcagatttaccttcccggaactgtagtggtgatggtgggggaagcactctcgggtctcaatgggtggggagcaccagaaaaacaagatccctgagttctgcatcataaggctccaccagtgtgacaagcactttacaagagcagagtcggcctagtcagagacaggttgcttctctgcacaatgcaaagcaagcagcgaccgctctgagcctgacttttggagctgctgaccccgcctttgccctgggctaatggcttggccttcatgtaccctcagattggcggccaatctttcctctttcatctcctggagcccaggaaatgatcagtggccttgcacctgggttactttttaatgatctgaaagaccacaaggagccagcgtttcttttgtgtcgtttctcattcagcaacctaatagctatccgacgagagattttcttgaaaagaaaaaaaaacgactgctcctcttgggcgactctgattaaactctcacactgcgcttattaccaggcatcaggcctgcatgaggccttctgactgctggggagtcttggtgtctgcactctggctttgctgccaacaagccatgaaatgacggatgtctatactgaaacttccatgtgaacagcaaggagagtgaccaagaagatgctgaggtccagagcttcctgtggcagtgctggagggggaatagagtttttctgtagtcatcccgcttatactccaatcatgatcaaaccaaagccaccctacaccacactgggatggaggcccactgccagtctccacaaccgaagctaggagaaagcagaacaactgttcccttacttccctaactctgaaaagaaataaaatgttaaaaacctcaaaatgtctgtaatgcagtctgaaaaagacaactttgtaaggactgcaagagaggcaagcattgatggcaggagagcagtcaaacctatgggaatatccaggcaagtctagggtacgtagcacaagcagtgatctatggctagctattctgccaacacacgtaaagtatttatttgggaaatttcaggtgtatagctatattcacactctctgttagaaacataggcccaagttaaggcatggcattctaccacatgcccacagatagctaatgtgaacaagactgacagctagcaagcagggaggcacagaaccagcaggccctcccactgctggtagagatggaaaattaaatgatagaacttttgaaaacatccagacagcttctcaaaattccacattagtttttcccaagacccaccaactcctcgatgttccgtaagagaaaaggaaatacctacccagacaaagaattgtgcctgagatctgggaaacaagctgaatagccctcagcaaatggaaggataagccagatacagggtatctagacacatgaatgctggtaagccataatagtgaactaaatatttgtacacacaatattaccaagaaatcttagacccattatgctgacagacaaggctggatgccaaagaacaccaaccatacgtgctttagttactttcctgttgccatgagagaatgtcatgaccaaggcagcttatagaaggaagggtttattttggcttatggttccagaggctcagggtccatgatggtggtggaggcatggcagtaggaacaggaaactgagagctcagatcttgaactataagcacatagcagagagaataaactaaaagtagacaagacttgaagcttccaaattctgcactcagtgacataattcttcagcaagcttgcacctcctgaatttccccaaatagagccacctgtttgggaccaagtgtttaaatgtctgagactatagggaacatctctcactcagaccaccacagtacacggtgatgtaaaattctaaaacaagcaaaactattttagtgtgaacaaaagatcagtggtctcttgaggctggggtatgggtggggtcagctgcaaaatcatgaaggaaagttaagggtgatggagagtttgtctatgatagctgtggtatgacataggcgtatgcattgattaagacacatcaaactatacgcttagacttggttctccttcccgtgtgcatggcatgccctgataacatggtttaaaaaggaagagtgaacttctaattagcattgtctagaaggatttgtgtaacaatattttttaaaaaaagaaatgaaagaactgaaaaggttgaaaagataaagatgaaagaagcaattttaaatgcacctttttaaactaataacacacaaaaatgtatgttagtatgctatgtaaaacactcatttggtgtttgccgatggcctgctttaaagatggagtatgcttggcaatgacagctgctacagctagaagcgaaccttatgatatgtatttcaaatgaaagaaacccaaaatgtgttgagccaaataaaccatgatactcaatttgaaacccagccatcatgacacaatgtcctcgagatgtcgccaatggtgtgttgcttatcctagaacaagtcagcagatcttacaaactaagttgtggcattcttttttttttccccaaagcaggcttaatttttttaaaaaattcttcttttggaagactttggaacaagctaaaaaattatgttaccaagtttaaaaattcttgcagatatgagatttttttaatatcatcttcagcaacaaaatcacataatgaaataccccaaagaagcactttgaaaatgttctttccccggcaaggctctcttttaaaagatagctcttctgccgttcattactaaaagtcatcattatcttagaagagaaaaattaagtttattctttctaaaatacctcccgagtagaatagctctgacagctacttgtcatcacaggaaattttagcaaattgtgactctgccttgaacaagaaagtcctatgattgatctgtaagtgaagaagctcctttaagctctccatgatgaaggaaccaggaaaggcctgcagctgaacagattttcaaggacaaatccatgctattaccaggtactataaacagtgaattatcacttaaaggcattaacatttttattgtaaaatacacacaacaaaaagtttcccatcttcatcttacataagtacagagttcagtgctaagtatattcatatcattgtgcaaccatcgtcaccatccatctccagaactcttttcttcttgcaaaatggatcatcaaataacaattccccatctctgccagcctgcagtccctagcaacctctattctactttctgtctctatgattaccacttctctagttgtctcccataaattaaatgcacaatatttggctccttgtgattgattgattgattgattgattgattgcacatgacatgatatccttaaggtgtatttattttgtagcaagtgccacaacttccttctttttaaagtcttatgaataatccatgtttaccacattttgcatatctagtcatgtgtctgtggacacttggactatgtctcagaccattttgtgttgtattaaggaaatatctaagaccaggtaatttttactgttttttttaatttattggttgataattgcatatatccatacaatgtatcttgatcatatttaaccccatttccttctccctctcctctggatgctaccccttccccctgacaatatacccattcactttcatgttctagttttttgttacaaatcactgaatcttttcagtggtgcttaagtgcccatgtgtatagggctatccactggcatttgggcaacctaccagaggccacaccctaaaagaagaaaaaagactttccttctcctgaagccatcagctgccagtatcgtcttagctaggggtggggctcccccagtcatgttgtcatgttgactggcttgatctttgtaaatcttgtgcaagctacccccgtctctgtgagccatgttgtgtctagaagacagcatttcttagcattcttctccatccagtagctttcacattctttttacccctgtgtctgtgatgtttcttcagccttgtttgagagctgatgtagatattttatttggtgttgaggactccacagtcagtggctctctgttatttaactagatatgagtttctgcattagccactgcccactgcaaaaagaagcttcaagggttcaggttgagagtggcactaatctatgactatatatataaatttttagaaggctgtttgacaacatgtccatttagtaaaacagcagaagtaggtcctctctgtaggacctatgtcctccctagtcctgagttttgaacagatttacagtatcaggacttgaacccaatcagagaacagttggttattccaataacagtcatgaaactactgcagtagtaggtaaatcttacatggtaggtgttgtaatgctgggtaaggccattgatgtctttttttcccttggttgtttgcatatttctgtgactgtgaaaaccacgagggagtttcctggtcacttctagattgaattttttatgtcttgcaaccaaagtgtgtgctatctctgacaaaagtatttgccatatagtataatgaacagctaagagcattggaagtaccctgttttgttttgttttggttttttgagggggggcattgtcactgcctcataattcagttaactcatagggaggcatcccataactggcattgaaattattatttaattatccatttcttctgggagaagcattgcctaccagtgcagggtgcctctctttaaataacttattttaattacatattttttatattagcttacagagcagtgagtttccataaggattcttcatacaccattagttttagttaacatagcttcctatctcttcctctcggcttgtggtggttggaatgagaatggccccaataggctcctgtatttgaaagctcagtcaccagggaatggcactattcaagaaggattagaagaattaggagatgtggctttgttggaagaagtgtgttactggggtgggctttgaggtttcaaaggctcccccaggcccagtgtctctgtctctgcccgctgcctgtggatcagaatgttcggtctcagctcggccccatgcctgtctgcttcctgccataatgatcatggactaacccattgaaactgcaagcaaccaccagttaaatgcttcctttatgaggtgccttggtcatgatgtcttctcgcagaaatagtaagtaagacaccactatctcaccagttagatctttaattcccagtatccttataccttgtcttagcatttttataactgtgaagagaaaccataactacagcaactctttttgtttgtttggtgtttttgtttgtttgttttgtttttgttttttgagacagagtttctctatgtaactttggagcctgtcctggaactctatctgtatgtagaccaggctggccttgaactcacagagttctaactgcctctgtctcccaagcgctgggattaaaggcatgtgccaacaccacccagccacagcaactcttataaaggaaaacaactggagttgacatacaggttcagtggtttagtccattattgtcatggcaagaagaagcatgtcagcacacaggcatccatgatactggaacatttacatcctgagagctttatttcctgaaccacaggcagagaaaaccactgggcctggcttgagtttctgacaccccaaagcccacctacagtgaaacactttccccatcaaggccacatctactccaacaaggccacctcccaatagtgtcaccccctatgagcctatggggaccatcttcattcaaaccaccacaccactctattttattatctcatgtattctaccatcccctcctctcatgaaggaagactaagtacttttaaaaacagaaatttctttctcatattgctggacattgagaattttcaagatcaggtagctgacatgttgggttgcctggtaagggctgcatcctccagaagggaagacatcatcctccagtgataaaaggttgcaagaccagctcatctaatgcctccttaagccccatttgcagaatctttaatcccactcagcaaagaggtaccttcaggacttacttaccacttaatactaccacactaataacatctgagtcagagcatgtattccaacagggtcaggctgttcctgcatttagtgagtgcaggttgcatattctgtatccaagatgcttgggagcaaaactgttacagatttcagaattattttttttctgatttacatagatttggctggtggaacatccctaacttaaaactctggaattagaaatgcctcaaaatcccaaacctgtaggacaataagaaagttttggattttggagatttattttatggcatgaatattctgcctgcatgtatatctatgtaccatgtgcatgcctggtgcctgcataggtcagaacagggcaccagatcccccagagctggaattgtggacagttgtaaggcactgtgtaggtactggggagtcaagtcaaaccttggtcctccacaagaacgatgtgtgctcttaactcctaggcctacctccgcatcagccagatataaatactcagtctcccgtaaacacggaagtcacgatctgcttgagatactgctttcaaagttttggagtatatactcagaaatgcaattgctgcatcacatggtaattccatctttagcattctaaggacctcccataatgctctctactgaagctgtaccactcacattttgccagttgtgtaaagggtttacattttctgtcaatttcaccaatatttcccaagaaccagcttcttgctgtttccattgtttattttcttatcttttttctattcatttcatttatctctgcttttccctgtaatatttcttctagatttgaatttagtttgttcttttgctggttcttcatcattaggttgttgatttggtatctttcttgtttcatgcaaacatttacagctgcaaatgcattcttagagctctttattttgtaagtttgaatacgttgtattctttggcattcactagtattttctaatatttccttttatttcttattttgatgttattttgatcctttgggtatttaagagaatgctgtattcttctgtattcctctttttgaattctaattcattccattgtgttggttaaaggtaatttgtactatttctccttaatgtttagctttaatttattacctactatgtgaaatatactgaagcatacttcatgtgtactatagaggtgcagatattttgttcttgggtaaagtgtcctgtgtatgttcattaaatttaactaatctgtcgtattgctcaagtcaacctgtacattattcaaaagtaggatgttaagttattcaattacaattgtataaatgttataagtattaatttcttccttcaaatctgacgattttggatatatatatatgtacatatacatatacatatataacatatatataacatacatacatatacatatatagcatatatgtatggatgtatatatacatatacaacatatataacataatatacatatacacatataaacatctgtgattggtttgcaaatgtttaaaattgttatttcttcttcctggcaaatcttttattaaaattaagccgtttttctcttttataactttttttcatttaacatatattttgcctgatattaaaagcaaccatttgctcttttgctgtcattgtcatgagtatcattccatctctgcattttcaactatttgtgttttagaatctgaaatgagtctcctgtatacagtatataaggggatcctatagatcttttaaaaaaattactgtgcctatctcttttgattgtagaacataacccatttacatttaaaggaattatgtgtcagaagacactaatactgggctattttcttttctatatgccatatgctttttctttacctcatttcttataatactgttgcttttgtatttaactgaatcttgacagtaaaatgtttaaatttattttttcatttccttttgtgtatgttacatagctagttatctttgtggttaccatggagagcatgcctaacatcttaaagtatgacaatctaattcgaatatataccatctgaacttcaataatgtacaaaattgtgctcattcccagttctgactctacctcttccagtaattactggcacaattaacttgttaattaacttgactgttaattaacagtaataactccactattttttgtgtataaaatcatcatcatattgtataccttaataataattccatttgcatccatacgtaaagaggggttatatccttggatgtatatgttcacaaatatcaacaattttaacacgttattcttttaaattatgtaggcaatcaaagtaaagttataaaacataattttaacagtactagattttagaaatatccatatatttacatatactaagatattttgtcttcatacaactttgagttaccatctggtgtctttttatttcaacttgtcagtggcagtgagaatttcttgtagcagacagaagcacagcagtaatgcattgccttggattttgtttatctggggacatcttaatttttccttgacttttgagggtcaatttttctgagcatagagccctttgttaactgtatttatttatttgttttgtgtgtaaaagtgttgtggctatacacataggcatgagtgtgactcatgcctgcagaagtcagaaggttcctggaactggagttacagatggtaatgaactaccatggaggtgctagaaaccaaactcacttcctctgagagagcaggaagtgctcttaactgtcaagccagttcctgactttttttttctttcagcacattgaatgtatctaccaatttctggcctctaagttcctgatgaggcttctggttataatgttaccaaagattccttgtaagtaaataatgtctcttaggcctatttgaaaaaatttcaggaacattattttgatgaatcttccagattgaagatgctcttctctttgcatccttggattcttctttgccttgatttacttttattttgttaagatttttttattaatttattgtttacattccaatcctaattccccttctctcctctcttctctatacccccaccccctacctcccatctgctcctcagagaggttaaggtctcccataggaagtctactaagtctgtcccatcatctcattgatgcaggaccaaggcacctcttcatctcccactaaggattgattttcactaatgatacttttctacctaacacatttcaaattaataacttgcttattagttacctacttagatcccaatgcttctgaatttgtggtgacttaagaaaacagtttgatttcatgttgtctacctgaccaaaagtcactgttgtcactggaatgagaatgccatggttggctcgacctgagtccctgtgcacttctatggccagggtcagggaaggcaactttaattggcagcattaccagcatcacaagagagcagattagaagagaaagaacttaccagaactttccagagaaagaacaggtgaacttgacagaaagaatacattcctactccactctaaataagataaagtgtgtggaagccttttgtaaactgcaaagcattgtccaaatgctaattgatgctattatttctccctgttaaataaagagctgcattatcttactagagtaaattaatgctggtagcaaaccactattgttccactcttcagcacatgaaagtaaagatgcagtaaataggcaagaggtcaccagcaagaactgtttagcactgaacccagaagttctgcttgttactgagaaatgagactgtatttacatgaaaacaactatctagccacaatgagggaaactgcaatatggattttctgagtgctgttatgccctctgactttatcctagtggacattttagaagaataagatacaagcccacccttggactgtttcattccaacaaagtcccagtagttccaactagaaaaaactcaaggagggttcaggacaaactgactgaatttttcacgttttcttctgatgccttcactctcggtttctcatgcttactgaatgatgtttaatttaattcccatgcttaaggcagtgtgctctgcattgcatctgtgtgcagtttgtttgaaagggtttatgaggcaaggccaaaggcaggaagcacaccaccatgatatcttaatgaatagaccccctggggaaagaagtacccatataatgaagtcagaaaagaaatcataaattccccaagagaccaacagcttgcaggtccaagtgcaatgaaaatacttccaaaaagattaggtgaaggagaagacaccagtgctagatagattctcagtataactctaactaccgtgtgtgttcaattggaagccacacatgcgtgcccagacatgtgcacacaaaagaatgaaaaggcacctctagttaccttctgcaaggttgattaaactctagaacttcaaagtgaatgtcgggagtttggaatgttgcaagttcagagccaaatttccttgggccactttcagccctcttcataggcatttgttgcccttctctgtacctaaactagcagcttcgtggccactaggaaagtcatttaggatgtactcacagggcactgaccttcctttggaaaacttaacagatactggtgtccaccaacccaaaagctaagggtgtcatcagatagcatctagggcctatgttctacttagggttattcttgctgtgaagaaacaccattaccaaaagcaagctgaggagaaaaggtctatttggtttatacttccacatcatagtctatcactgaaggaagtcaggcagaaactcaagcagggcaggaaccaaccaggaggcaggagctgatgcagaggccgtggaagtgagctgcttacttgctccccaggacttgcgcagcccgctttattatagaactcagtaccacccgctcaagggtgacaccacccacaatgggctaggcccttccttataaatcattaatttaaaaatgctctataggattgcctacagcccaatctcacagaggcaccatctcattcctgcctctcagaatgactgtagcttgtgtcaacataaaactagccagcacagcctgcaacagaagtttgctactcaccacttcggtgtgtccaccaatgtatttgaagacattttgatttatggccatctccattctattattttgtttatttttaattagaaacaagcttcttttacatgtcaatcgcagttccctctccctcccctcctcccttgtccccccaccccccatcccaacccctttctgctccccagggagggcgaggctttccatggggatcttcaaaatctgtcatatcatttggagcaatgcctagacccttccctgtgtgtctaagctgagaaagtatccctccatgtggagagggctcccaaagtccatttgtgtactagggataaatactgatccactaccagaggccccatagattgtccagacctccaaactgacaacctcactcaagggatctggaacagtactatgctggtttcccagctatcagtctgggggccatgagtaaccccttattcaggtcagctgtccttgtgggtttctccagtctggttctgacccctttgctcatcactccttcctctctgcaactggattccagagttcagctcagtgtttagctgtgggtgtccaccgctgcttccatcagctactggatgaaggctctaggatggcatataaggtggtcatcaatctcattatcggagaagggcatttaaggtagcctctcaaccactgcttagattgttagttggagtcaaactcatagatatctagacatttccctagtgccagaattctcttaaaacctataatagctccctctattgtggttatctcttttcttgctctgctcaattcttcccctgactaaatcttcctgctctctcatgtcctcctctcccctcctgttctccccctctctttcttctaaacttcatgaaactgatttcacattagaacatggaatctggggtagaacatggaatctgtccagaacaggaacatgtcctgttcctggacaatggtcactcatatttggcttcagagtcagctatctccatgaaagtgagagttgcatttttgtgtcagcacatacataaatacacatgtatgtacacatgccttgtctatcactcttgtgagccctgccttctgcttccagctcctgttgttccaagaaaaacaaggaaggagaaataattgtcactctctagttttatgtcaatttgacacaggttaaagtcatctaagaggaggaaatctcaattcagaaaatgccttcacaagatggggatgtaagcaagcctgtagggcattttcttaattagtgattgatggaggagcttagatgattgttgccagtgctacccctgggctatctttctgggttctataagaaagcaagttgagcaagtcatggggagcaatccagtcagcaacaccctctatggcttctgcatcacttcttgccccctggatcctgccctgcttaaattcttatcctagatcccttcaataatggactacaatgaggaagtataaaccaaataaacccttttctccccaacttgctttttgtatatggtattttatcacagcaatagaaaccctaactaagacagtctccctggtctattgatcagctcaattacttttctgttaattaattggacttctgaatctttacagttttaggccttgagtttttaacacaaagcaactgacaacttctcagaaaagaatagatatggcggataagggttgtctgttatcataattaaccctattgagacacagtcccaaaattgttaattattcaatttaggaaaagtggagtgacaggaacatgagagccatctctctgtgacacatgcacacacgcacacacacacacacacacacacacacacacacacacacacacacacaccaatgagtgcatgtgaagatcagaggacaacctgcaagagtctttccttctaccatgtaggttcagggcattgaactcagattgtcaaatttgactacaaatgccttttattgactgaagcatcctgcttgcccttagtgatgggttgaattggacagacagggttttttgaactccttcattataatgtttcttcccttgctagccatcccctgcctgtgtgcagggaaacacattgtgtgactgactcagcccctcacttataatcagcagtttagtacaagggctcaaagtacagagtctggctcagggctgcctggatttgaattctaacttcactgtttattggcttgctggctgctttcccttccaagagttacttaagaaagtgccataaactgggtggctgcatgggaaattttgtgacacggttcaagtctgtgatctgggaattggcaggcacagtttcttccgagggcagcaaaagggaattgttccatcattgccttctgctctgggtgcttcactggagtctttgctggtccctggcttctgctccattacccacaatgctgccttgatcttcattcacctgctataccacttgtgtacatacatacctgcctctcaagatgtcccttttataacaacattagtcacattagactagaggctcactgatttagtagaaccaacgacagcatctgcaaccactctatttccagataagttcacacctgtaggtcctaagggtatggatatcaacatgcaaattttgagaggccacaagacaacctctaacatcagggccttagttaggcttttattgctgtgacaagacaccatgaccatggcaactctaataaaggaaaatgtctaactgggaatagcttacagtttcagaggcttagtccatcatcatggcgggaaccttgagtgtaggcagacatggtgcgggagaggggctgagagttctatatcttgatccacaggctgcagaaagagaacgagacacactccctccaataaggccatgcctcctcccacaaggctacatctcctaatagtgccacttttattattcaaactaccataaatggtaaattatctagtttcaatttctgcattaataaaacagaataacagtgcagcctgctatatgaggttgtgatacactgaaatgaattaatatagcccagacacaaagtcaggacccagcacaggtcagtcagcactgccaggagctggtattttgagttatgtctgtctgtctccttcattaacctattgtgggtggggattgtgcatggtcaaatacacagtggtattttatcacctatgacacagcatgtaacaataccctttctgagctatcgtctttgaactgattgattaacctaactctaaagcagagtgatatcggggctgggattgaaagtctgcctgcatttatgcgatagtgtatttgggaagattatgctgctcatcccattcatgaagttagatcccagaggctctccttgcaaagaatttgaaacctctcttttttgttgttgtctccccaaggtttcctgctttttaagaaagcctggggatttggtattctgcatgcaaatgccattgtcttgagacattctgaagcatctagactgagcagtttaccttgactgctgtggtcctgcggctctctactccgttgtgatattatctgtgcaaggcaggaaaacagatgaatgctcactgtgatattgcccctcagaggcctgagtgggccaatggcaatctttaaatctggatgccagattaataacatgctttgggtgacttctaatatgtattattcaggagagatgttgttttaacctctgcaactttacatgacttccgagctaatagaaagtttttctttgctttgtttgaaaatcatgtggaacggagcccagcggaggcgaatacatcagcatgagaactcctcagatggtccaaatagcaactaatgatggggaaagtggcttagttattctacagaaagcatggactaggaaagcatgggcaatcccttgtttagtgcacgtgatgcacagactggttcttgacctggtaaagcctggctccactgcttgtgctagccataaatgaggtcatctctgagatgactccaaatggctaggtgagaaagcacatgcgcagaggacagtgggttcagcatatggctttggcaggtttccctctggtttcctgagattgacaagtcttatcatttccccacatgccccttcctcttttcaacaaaattgttgatgtatgattccgatctctgatgtccattctctgcatcttcttctgtaacagattagtttctatacctctcgatcctgagtcttctctctccagactgctttctttcactctcagtttctgacacccaccagttaatgacttgcttggagctcagtgtcaagttctctgtgttcttcacggaactgtctcaaatgggactcagaacttgaaagaccgtgatcctaccacaggaaagtcttttgaaacacagagtgggtggggttgcctctgttctgagttctgagggacatcttagtagctcaggaaagaaatctttctgtttggaagatgaaaggctattcaccattgctgtgcatgtgagtctttgctaagtttgaaataaaatgaaccaagagaagtgtaacctggagcctgccaggaggaccagggtctttggtggtagacagcaacatatgtgtgggccaaagtatgtcagccagcctcttactcttctgtggatgctctgaagtggtacccaacaagtcagttaagccactaactgactggtcgtgcaaacacgtaagttagtatgtggtttttggttcattttagaagaaagatctgtaggaatggagtggtctgggtcagttggcctaacacaggtctggatattctctgatgcagaagagaatatggatagtgaagttccgggaccaccagtccagtcaataaataattgtattgcataaagatatcagagagaagttggagaaacacacacctagaccccaatcctagggaccatgatttgaaagacttacagcaaatgtgttttgttgagacctaatttcttactagagctctgttgtttgatgtgtttgttattgtactgttgagtcccagctccattccctacatgaaggagctccatgtgcctctcttcagatctgttggccatcatgaatatttcatggttttttgtagccctgcatgcctgaccactcagaaataggatgtttatgtttctgcccaagagttgttttcttagaacacacagaacaaaattctcagtattttaaaagatgtaaggcattgaacaaatttgaagtgtgtgtgtgtttcatccaattccataaccaattttcttatatttccttaataacttttaaacaggccaagttaagtatgtagtgaagtatgtaatttgataatcacataaaagccctaattccagctaaatctttggtagaatttttaaattttcttttgctattaaaatatcccattgatagcaagcttctttactggcccactactatgaagaaatgaagaaacctgatgtaattcattaataggaagctcagttttcctgcctatgtggtagagataatggtaacacctttcttggtgtcgtgggggtcgacaggaggtggcaaagaaagtttgcagaaggtagaagcctgatgctaccattgactttattaaaaatgaaagtccccaaaatataatcatgaggcccaactatactcatttcatcacacagtgctatgctacagatggatcttcccagaagatcagaaataaattcttcattggacactaatatttggcctttctctaaaactcatgatcatgctggggactatcaaccttgaacaccctgaaggtgttctagggtgagaaaaattccctagtaaggaaactggcatgttggtatgaaagggatgatatgcccaagaaaccgtacgtagccaactgtgcagagcagaagagcagacatgagtcttacaacaaggttctgttaagactatcgtgactgaaagttccccttgggctggaaagacactaagatatataagttagttcagttgagacaatggaaaacttaaaccagtgtcacacaaagttgttttatatcttataagaaggagttgaacaaaccaagggaagtggagctctaaaacactgttcagagagccagccccaagttccttgcatattctttccatgggaacatggtccatggctaacaagagaaggttacctcaggatctactagctgctagcatttcatcaacaaagcttccttttaggcaacaagattaagaaagggaaagtcaggagtcactctccagagccatttctggccttatgggaaactttctagaaagtattttccaacaatttgtgcttaagtctgtcctagaggcaagaatgcagacacacttcatggtaagggaatgtagcattataattgcatcgttttgcctccaataatgcaggcattttatttgtacggtaagaggcgggaatggttgttggattggaacagaccccacacaaggaatttgtctgaggctttttgagaaaagtgtagacaggagaatgtttagtcagggaggattgctacctggtggcctggtggactccacctccatcctgttggaaagtgaccattagtcccctccctactctaccataggaaaggggggcggggtgatggcatctattgtgtgcctgctgtttcctaagcaacagacagccactttacatgaattatgctgttaagtcccagagcagcccatgaagtaaatgctaatcttactcctattttacatgcagaggacttgaggctgtgagggtatttaaccaacattcctaggaggtgaagaagcacaactttgaccttgggttttcagtctcttaaatgcaacactgaatactgttttaaacacataacacatgtgcacaggcagacatgcacccaggagagaaaagcagagagtcgtgcaaaggggtgagaatcaggtgaatccctaaaacaatgtttcaaaaattaggcattaaaaagtaaaaaataggctggcaagatggctcagtagatagggcacttgacaccaagcctgataacctgcgtacaatccctaggaccgtgtggtgatatattattcatgatttaataaagccactggagatcaaaatgtaaagctagccacagccatagagccaagaagtggtgatacacacctttaattccagcagccacactagtaggctatagaagctgggcagtggtggcacacacctttaatcccaggactcaggagacaaaggcaggtggatctctgtgagttcaaggccacccagggttacattagagtgaacgagtctaaaagagaaacagctcacacaaaggagatctcagcacatggatctcagcactttaatcccaactctagaaaaatatataaggaagaagcaaagtcagtctcggagaattattcttcagccacattgaggagagtagtagtctggattgtactctgaggattcatggaaacaagatcacccatttgggtctgaggtagaggtaagagctagtggcctggctgctttgcttatctgagcatcaacttgaaccccaatatctgtctctgtgtttttattagttcgtattacagaccctcacagtggaaggagagaaccaactccttcacattgctctctgacatccacacatgctatagcatgtgtgcagacatgcacacatcacaaaccacacattacatacaagtacatataaatttaataataaaaagttaataaaagtaaatttaaaggccataaaaataaattttaaaaatccaatacctgatttttaaagatgtaaaatcacgaacctgtaagttaaacagtttaagggaaactttagaaactatgtatttataggcaatgaaggaacctaaccctaaaaggaaattcccagtaaatgggaaagtggtgcagccatgaagtcacagacaatagcatcccatcagaataattcgttctcaattctagcaagattacttgtgacactgccatctcatcttacagactaaagagggactcagatcactgatgatatgttaggcaaaaccctcagcaacatttagactgcaaagtctaaagtctttcataatataaacagtttcaggacatacttaggttctcttcctggcaccagatgcagctgtattcaggaaggcatgtgacataactcagaatttccttttgtatgcttacattcctctcatccaccagcagaggtgcccagagagtgaaggaccaagagtggccttcccactttgaatgtgttgaatgtagcattgcaaactaagatggaaaattgaattcatttccctttttccattttccattttgtgtgtgtgtggtggtgtgggggtgttgcacttgtgtgtatgcatgtcttagcatgtgtgggtacacttaagtggaggtatacattcaggtatgttagagcgggtagggaggcctgaagttgatgttgacaaccgtcctcattgactctttgaccttattcactgagacgggagcctgtcaataaaacccagagctcaccaatatgtgtagtgctattttgcttgtgtttaacaaataaagcttgcctgaagatcagagtgcagagctaagccactagaggcccggcagtggtggcacacacctttaatctcaggactcgtgggacagatggatgtctgttagttcaaggccaccttgagctacatgaaattgattcagtctaaaagagaagcagagctcacacaaaggtgatcccagcagttgggatcatatgcctttaatcccagcactagggaggtggagacaggagtgatatggctgggtgaagacaggaatataaggcaggaggagacagcagctctggcagtcagtctgaagagtctgaggaggcagtgtgaggacaagatcaccccctttgatctgagcattggtaagaggtaagacctctagtgcctggctgctttgcttccctggtccttcagctttcactccctgatagctgactccaagtttttattattaagaccaattcgaattcatgttacatcgctagtcctgctagccttcctgctctgagaatccctgtttctgtaatctgaagctggcattacaggcaggctactatattcattcagtttctggcgatccaaactccagctctcaaagcaggttaaaacaaacactttaactgctaagccatcctcttatccactagaaaaccaaattctaatgcctgctatgactcctttagtgagatgattatttagatattagatgccttcaagatgccagagacactgctggataggaaacatggcatctactgccagatacttcaagtggccacttgctgggcattgtcccacacacctttaatcccagcactcggaaggctgaggcaggtccatctctgtgacttggaagccagtctgatctacagagcaagttccaggataggctccaaagcaatacagagaaaccttgtctcaaaaacaaacaaacaaacaaacgaagtgtatacatgtatgcacacacattgcttctatagacaatgcatatttattaggactgctggtcaacctccacccacaaagtcttcaaagctcatctgcctctttgatgttgtccttctctggttgtagagcaatttggaacatcaacataggaaaaacactgtgcattggcattgacttcttttttttgtttgtttgttttttgctggggtcttggcagccttcccttcataaaagcttcatgtgacttcctcctgccacctaggagtgtgtatggtgatcaaggggctggtgcttgctcagtcagtacagagaagcattcagaacacatcaaattctatccttaaaccaggacaaaggcaaccaggaagtaagcatagttatcttggtgtctgcttccctgcctctggccctacccctgtgcttctatctttcactgggcccacctgaggtccttagtgctctgctggctagctggctttgccagcttttttgtttgtttgtttttacaggcacgtcttcggctggctgcagggtccattttctctttcttggcaacacatttctgatggccttttctctgaacaggcgaagcatcccacaagtcaagaaggatactatgcaatgctgagaattcactttgtttacagacacggggcagatttgtccttggggaggaacaaaaaagaggagtgacactggccccaccattggtttgactgcattaagataaagagtcaccaacaatgtgtctctgttacattaaggaaaacaatacggaacttccccttggtgtcatttgaccaagagtgagtccagatttgaattctctgcttctcttttccatcctactttatgagtctgaatcttgtctatctgaatgctatcttgtgaatctgatcgtgtgtgcatgtgtgctcaagtgtatgtgcatagccagtctttgccctctttttgaacaacagtgtaggaagcattagccagagaagaaccaggagatgcataataggactcttcagcagggttttataaggcataaagtcattggtcattgacccccactggcccaggtaataaacaatatcacaaatatctttgcttatctagcaatatctgtatgttgctaccaacatttcaggtgcctgttctttttacaggggtctccttcttcctgggtgctgtttcagcagatgattatcataacataaaggcccaagcatagttccagtcttagggtgcaagagacatttttatcacaatgcatactcatttgcaatacaataatgttgactatattaccaatgctcataaatatttgtgaagtcatttgcatagatgtctccttgaagtagaaggtaagatggtggttatcagaggctgggatgaaatgctggtgaaggtgcacatattacagttatgagaatggataacttgccacaggtcttctgggttctctccgccactctaacacagaaagaatccaaactataacataatggtttccataacaactatggtctaaacttgttaaaacaccttgatatgaccactttcctcagagcctggcactccctgtggtgtttcctccagacttctgtctcctgggttatgaaggttcttggcaaagaacttcattttacatatcaagctcacgctaaagctactggtagttccaacagtaaatcaagtgttgctttttataaacatttaagcaaatactcagaaccttcattaaagaatggcatttaaaagggtggtagaaaatgaccggttaggagtctaatgtttccctctttcctctcatttaaatacctatccatggggaaagaaaaagcaaaacacaggagaagatctcaaatttaaaagctatcagcagcagccaccctcttcatgcctgcctgtgttctgattggaaactgaaatgttcccttcaccccaggatcacatatgactacctggtcccatctaatggtggtgttctgagaagctgtggaaacttgagcacaaggacctatctcatcaatacaggccactgagtgtggatgttagatggtcatagccttgccttgcttctggtcccattctataggctcctccctctggaagttgagctaccctggccaccaagtttccctgccgtgacaagctgtatcctctaaactttgaaccaagctcaactcctcctcccctaaatgtttttgtcatatgttcccttacagctgtgagaaaagaagctactgcaccatgttcaccaatgttagccacttaagctatggccttttagtgctttgtctggtgaccatgaatatatatcacaaggacttcattgctggcactagttttacctctgcatatgctggtggtccccacacaacatagctgctctcttcttgtggctagtcccagtgttgcttgggtgtattactcctagattggtaaaatgtaagacgattggccaagtcctccatgctttgacagtagcctgcttctcgaaactctgccccatgaaagcatactaaatataataactgagaaataggcttttgctgtggaaccaatcagttccactgaacccataggaaaagaaattcagtcctatgttgttgagctcctgccattccaagaatgatatggataggtatggtggcacatacctttaatgccagcacttggagacagagacaggtggatctctgtgagttcaaggcccaccagggctatatagtgaggcccactcaaacaaacaaacaaacaaacaaaaccacaacatcaacaaaggaagaatgatacaaatgatagagagatagagacgatagttgctaggtcagtagatggagatatgtaaacttgtttttttctttatagcattttaaattttatttatgatttgctgtggatgtgtgtggatgtgtgccacagtgcacgtgtgaaggtcagagaacaactttccagaactgattgtctctaagcacactggtcctggagaggacactcagatcattagagctggaggcaggagccttttccaactgagccatttctccagccttagatattgcagtgttttattgatttccacatttcttcacttctaatttgctatttctttgttttcctctttaaagcacattttccttattttgggtgctgttgctggggatggaggccagggttttttccacgtgctcataccaggcaagttccactaagctgcctcgatagcccctttcctcctgttttgttccttgctgtatataattaaaacacctcaaggcccttcttgcctgaaaatgttttgtgttccttcacggtttgtggatttttgtctgggtatagaattaaagtctagaaatcatttcccctcagaatttgcctcattttctgctcacatctgtgtttctcatgagatctggtattggtataattctagctcatttgaggctaatttggttttttttctctctctactcctaaagttgttcagttttgttatggtgtctctaaaagtagatttagtagccttcagcctactcctccccctactcagtgagcctttcggactgaaggataaggtcactcacagagtaaattattttttaaccatcatattcttttttatttaaaaagtattttatttttgtggctcttggaataaaactgaaggcctcagtcatgctaggcaagtgttttgccactgaactgtccatcaatctctccagtaaaagtattcttaattttatagcaatctattattttatgcctacaaagtctatgttattcagttagctattttttatagctatattgtttcccttgaagtaagttattctgtttattaatcttttactttctctttggtgtgatttatttctttgttttctgtttgcattgtctcagtaaatcatgatttattcagttttgttgtatgaaatacagtactgaaagtaagtcaaacacatctatttcaactaaaagaaaattctgacatttgtttggttaaatgtcactctaactacaggcagagatacttacatgactggattatttgaaatctggtgatccttggtctctgttccttaattgaagtgtgaggaacatagcatagagcagtgtgagcctgcatccccgacagccctctttctttaataagctggccaatgcctctgcctaaatggagaagatgtcctgtaaagtggatggacatatagcccatgtacaggtttgggtagtgccccagctctaactcacagggccagaaactgcaaatgaagctatctcaattttcctctgtttaccctcctggcatcagcatctactctcaggtcttctttctggcatctcatcaaaagcagcactaagaaatccagccaggggacaaaccccagtgatgtcaaactcacattctacatttgcaaaagataagacagaatgtcatcagaccaagatgacagccttttgagttgcttctcattttggcttttgctggccccaattttttaattttcctggcgatttcacctcattggagaatatttattatcctcattaatagattctgaatgccatgttgcatttttccaccaatctttttcttacccagttcaatgttttttctcttgctggctcttttcagtgtacatgcatgttaaggcttctttctcattaatataatttcatgtgtttctgtgggatctcacaaaaagagaggaggcatatattcatttggagtctgaaaaaataaagtatcaaagacaatgagtacatgattataaaaatggacttccaaaagaatgcttgtgatcaaagtatcacttatttcttaaatcaatagaccaagaggtaatttagtgaggataaggatcattaattcatataagattgccatacaaagttgtttgtcatttgttacaattaattaagtacaatacactgaagccattaatacagaagccaaactcttaaatgaatatgcacttgtattcacgcatataccacacagatgcatgcaaacacataaatatctacagtacatataatgtatttcatagtattctagatgttttttatttcttatctacgtcttttaattgtcataacatcctactacttatgcaggaagaagttttctagaaatgtattgcttatttcttttttgctatggatcttctcaactctgtgtttatatagtttagtcttcctgagggcctgaataacaacagcatctatgccctaggttatctttttcagatgttagcaaaaaaaaaaaaaaaaagccctcttttcagacaacatcattgtttcatgggggaaattgaagaaatctcccttcctggacccataggttgtgagccaatgttgttttagtctgtcttctatttctgtgaaaagacaccatgtctatggcaactcacacaaaagaaagcttttaggtgggactggcttagagtttcaaaggtttagttccattatcatcaaggtgaagagcatggcagcatgcagacagatgcggtgctggagaagtagccgagcattctacatccagacctgcagacaggaggaagagagagacacttaaagtgggaaattaccaatacagagtcaggtagagatataagggtatttaatagggaaaagccttacttacagagcgacctagccagccggcgtggcagcagtctgtacagcaagaagcaaagtgaaagcgaaagaacaaacgcagtcatcctaagtcccctgaccacgccctcacaagcttgtgagggcgtggtcaggcacacctgtagccagcccctaagtaggcgtggctacagcttcccctacagacactgggcttgaaataggcttttttaaacatctaagcccacagtcaatgacacacttccttcaacaaggccatacctcctaatcctttaaaacagtgcccctccctggtgaccaagcatttaaatctatgagcctatgaaggccattctcattcaaaccaccacaaattggaaacatgcttttccatgaaagcatgctagaaagttgccttctttaaggaaaaaaaaaaaaaaacaggaaggaggtttaaataaaatggtaagttggttaatgcacagcttagaaaaaaagctaaattctcagtgaccattagttagtctctatcctccatgtttgattctacttatttgttttttttgttatagttgtttttcatctcagggttctataatgaaatagcttatctccagccataagcacacaggtctactgcagacagcccagtgtggtataggacgtgccaggtcaaagccatgcctctgccctgattctgtcactttccttcttaatgaacttggccttttggcctcctttcccttgttcacatagaaatgtatcattatgtacagtcttcgaagcctttcccagctctgaccttctagaaggtgtgaaaccccttagggtctgcttgttcattttgatattgttcccttatagaatctttctccttctttataatcaccacacacaattaagacagtgttacaactatctccctttattcttggctttgctttccaaggtttcggctactcattgtcaccagaggtccaaaaatactaaatggaaattttcagaaattaataattcaccagttttagattgtggatcattctgcaaagtatggtgaaatctagggctatctggctccaccttgcccaggataggtaccatccctttgcctaggctatcccacaatacagatcctattcttctgctatcactaagtagtcatctcagctatcagctcaactgtgctagtgctatgatgattgggttccagtggtccctatgtattatcccaaaagcgtgacacagtgccttcatctcaccacctagatattgctttttttcacaccaccacgagaaaaagaggggcgaatactacagcgaatactacagcatctcaagagagaaaagtattttataaaagatctattatttgtatttaattattagatactggtcttaatatatatgggcatagatacatgccatggtgcacatatggagataaaaggagaactggagataaaggtacctgggtattgattttggcaatcaaactcaggtcatcagacttggcaataagtgcctttacctaaggagccatctcaccagtttgctgtgaatatgttatgtgccttatttataattaaatctttttttcctgtgtgtatgtatgaatagaaagcacccatgcactcagtattatctttgatttcaggcactgaccctactgggggtcttggatccactgagggatgaatataaatctaatactcttcttgtacttgccaagagactgcatgcatttgtattaagcagtttgaacaacaaaatctttgcaaagtgtgaatagtggcaatttttatttatttaagtgattagcattgagtttctctgtaatatgattctcttcctcaaggaacatcttaatgtctaaaagtatattgagttgtcacaatggcatcaggagttgaatagtggcatctagtgggtcataggcagggacacttctaaacagccttcagttataaaatagtccctatatcaaatgattatgtagcaccaaatgctgacagtgtaagactgagacctaggttgacaggacacactgctgggatcctgatattattgtataaagaaatctgtgactcagtgagacaaagcatgttggaacgagtatatgtgattataagaattcaaacccaggtctgacactgaagtccacacccatgactcctgcacatacattccctttccaccctttatcaccatactgacatgatctaacagtcctttttaaacaaaatatgattcttggggttggagaaatggctcagcagttaataggactggctatacttccagaggttccagattaaattcccagcagctcgcaagtgtctataactccagttctaggatatctgattccctcttctggcctatgcacacaccgggcatgaatgtgggcaagatacccttacacatagaaataaaggttttttttaaaaaaatatacatttatagaattattttgaccatatccattaagtcttcttctaactttcccctctgctaatgatccatacttttccctactttctctgctttacatgtctgcctttcttttatttgtttgtttgctctgagggagggtttcactggtagcttgtctgggatttgccatataggttgggtggcctgggactcatagagatccatctgctttctgccttcccagtgctatggttaaagatgtgtaaatatgttctcttaatgaaactatgtccagtcctcgttttgttgttgttactgataaacccttgagtgcaattagtgctccacatatgttcatgagtgtgtgtccatccactaggacatgagcaacctatatacccaaaggacagtgattcttcctctccgtaatcaccaactgttaatagctcctttgccaagaatgggacctcaggagccctgccctagccatgttgaaactttgactgtcttggatttgtataaattttgcatagatactatgagtttaagtgtgcaacaactatgttgtgttcagaaatcaccatgtcacagctctcccctccccattctttctgctcctcttccacagtgttccttggatggggagatggatcaagatgacctgttcatagctgatcactcacagttacttattcttggtgctctgaccagatgtgagtctgtgcagtttgactgcatgaccatttagcaaaagaacagtaggaaaccagatggttttaagagttgcacaagattgtcagcttcttgggccaatttatataaatagaggtttgtctgtctagccctgtcctgcagcttgtttctaaatcatcactcagaaacttaatattaattacagaatgtttggcctatagttctgacttattactaactaactcttacgtttaaattagcccagttgtattcatctatttattatcacatagtgcgtagcttacaggtctttgggcgtcttgttctttgggccactggcttgtgtctcccccaactctgcccctcttcattcaagtcctcagtttggttgttccacctaacattatcttgccttgccataagacaaacaacttttattattaaccaatgggagcaatacatattcacagtgtacagaaagatcaccccacagcaaatttgcttatcataaactaccaatattgttgctccttaccctggtatccaatgaaggcagtgtggtgacagtcagtgacactccaccagctatatcgtccatgccgccacgtgacatgagtgaggtgtgactatttcctacatgcttcagagtttagggtttcagacagaggcaatgagcatcatgggtaaagatgaatacactcaggtggagcatctctgatatcaagaacaaccatgaaacagcacaggatgatgatgtagggagccttgtgtgcctctactaaagctgaaccatggatgagaggaaggagcaaagctgcgtggctttcttccacaagccctctggaaaaacatttctggtgttatttttctggattttttaggggactagctacgtctctatggtgagatttttaaaccctggtgagtaacatgttcccatcgaggagcttctcttacgcagaatgtttagctcttatatccaggaatactgttttccctggatgattgaaatggatgtgtaatttccttctgggctatgtacttaatgagacaagtagaaatgaatactgattttttttaaaactgactttctatcctgtatgttctcaagggaaggatgattgatttcttaaattatttttatttctcatcaaaagaatatatagtttaagcatcaaataataataaaactgaataaatgaacatagtagccctcggtcatacctcctcctcccttccaacactccctaagggcaaccactttgaactccatttactgcttcatctgtattctgcctacatattcctgcataaattattatattgacactctgtgcttgagggtccagctatcacgagtagcagttccttccacctctcaatggacttacactggttcccaatcctttgtccaacctctcagggccagatgattttcaaaatttatatctaaaggacttcagaaaggtaatacgatcatagaccatgtattacttaacactcccagtgggatctgcagcaacactctataatgaaacacattacatctctgcaacaaaacatgaatatttatatcaaatgggataaagactataaatagatatgtaagctcggatcagggtttaccatcaatagtgttactgtagaattacaaagatatgttgatttctgtatcttttctagcttctaatatttaggatgagggaatattgacctagatcattatttgattaaattggtggtagttactgatgtaattatgatgtaatatataatatgatatacatcttaattcagtgctggggtgcttggtttagcaaataatctatgatctagtttagtttgcttttcctggagttattgactttgctttattcattagcttggttttgacagcctttgatgaatggctacatgctccagcagatctgaaaggtactgtgatggctagtttccattgtcagtgttacatacctgggaagaagcaacctccattgaggaactgtttccataagaatgtcctgtggtcatatttttaaggcattgtctcaattgctgattgatgtaggatggcccatcccactatgggccataacatccctggacaggtgggcctgggctatataagaaagagccttgggaacaagctagcaaacagtgttccttcatggtctgtgcttcagttcctgcctttaggctactgccttggcttccctcattggtagattttaacttctaagccaaataaactctttcctcctcaagttgctttagggcatggtatttatcacagcaacataaaatacactagaagacctgcctatccgtatttgctctgtagttgcctccctattgttccctaaggcaggtttaccccaggttgactttgcatctgattttgtttgcctacccttcgaatcatcagaggaggttcttagtagtttctagacaaggggtactcaagaaagttggaggttcacaatatcctctgaaactttttgtaaatagcacactgacatgtatgactttccaggttatttaaaatgtttaatacctgctggcctcacatactcttcctcatctactggtttttgttttgtttttgagataggctcttacatagcacagtacagcctcaaactctcatgtaaccaaggatggctttgaactctttctcctcctagatcaactccccaagtgttgggtttatagtaccctgctactatacctagctagaatccttctaactcagaattgaaaaatccattcaacaatcatcattattttgacaccaactcagggggtttaaataaatacctgtaaacaatattagactcacactttgccactacttacctctgaaaatatcttaaataagaagatcacttgtgttttaaaagacccagaggccaatacaaagcagaggacactgactatcagatgagcttctactcactgcattttcattttcttagttctgtggctttggctgccttacttgaattacttctcttttatttcacttccttattcgtaagatggatatagtgatagaacttctttatattgataaagactaaatgagcaaaagcatagaggtccatagagagcacatgacagttgacactatcaagaaattctagtaattattatcatttttatatcatctccagttgctaagacaattctcaattctgaaatagacttaattaaaaaacatctcttttataagtacagtttaataaatgacacagtgaggctgtctctaaaataaacaatgccaagcaatatatctacctactcagaaagaccagccttctctcatgtagtctggaatctccatttcccacagtgctggcagacgtgaggagcagagcataggggagagcttcccttggaggacagtaagcatccatagaagcacaggtcccctcacaccaagaagagagagagggtcgtagtgtgggggtacaaacagcactgtaatggaatgacaggattttggttatttccaaagctaagttgttttcatactggataagagaattaaagggtaaaagaaagtgcccagaattccatccagaggatgcactgaaggaaaaacaacggagaggtgtctgcactgggttagatgacttacccaagaccacaagccattgtcaatgtagaggtgtgggatatgctccacggagattttcatattgaatattctgccttacttctaaccttgctttgaggaaagaatctattttatctgtttatgtaacaactgaaataaaattaaagaatgggtctggtctcaggggggcagatacatgtacctttcaaccagaaggagacacaagtcaatttctgggtccattgtcctttgctcactaggaataatgttgcaacattcagcaacatccacttggctccctttctgatgccagctctacacagaacactacctcagagccatcatctggtaagggtctctttcctcttcctctcttttgccctcagaaatatgtggggtcagataaagtagagaaagtgttccatacacagaaggctatttagcaatctccctattagattgtgagtgacactaaagagcatagtgaccaaaattcctccagcatgctaccaaatgtcccctctagaactcagaccttaaattttagtatccactcctggttgagaaacactaatcattaaccagacagacaaatcaagtagctgccaatagaacatcaatcacaaaaacacagctgctaaaataatggtatatttcttagacccttccactttcatcatctactgtttttatttcacttatagcttctatcagatatgccttgtgcagagaacacatcaatcaatacatgtcagtgtaaatgagttgatcaaatcttcctgggagctttccaaaatcccaaatcaatttaactggctgttggctttgggccattcttttcacctctatgaggctcaatttcttggtttgcctaatggaaactgatataaaacccctgctagttcgaaaccaccaggaattattaggtttctgtttttacaggaagcagaatggcagtattgcacccctgtaaaggaggggagagcatcattctctagggaatgatgaacaggtgggaggaagaagaggcaggcaccacagagagcaggcactaaaatttaccatttcagtgtaactgaggcaaatgccatcttccgacaaagagatgtacaaagttgatttctggctttcctcctctttttaatcttagtaaaaaggcttcatggattaaaaagttcttggcatatagggtcaaaagactaagattatttttctctccatttttttcttacaaaattggctttcctaaaatggattcttggttttggtcaatctttatttctaagattccaaggctcaacattttcaaagaagataaatagcttcctggagagagagagagagagagagagagagagagagagagagagagagagagagagagagagagagatatgtgtgtgtgtgtgttagagtggagaagatgtttgccttaagtatggtcattactctgtgaacttatgctggccttaaatatttgtattttccatgtgacttgagtcagcaaaggctaacgaattttagacagcagaatagaccaggtcaatacactggagatttgccatccaggcagttcttatgtgacttctaactatgccatctgttggcaccttattacctggataaaattaatgatcacagtggattggatagaacctcctatagtgcatagccgtcttttcactgaaaaggaaaagcagggccaatgagactgcccagtaaaattaggacacttgccacaacctcatgatctaagttcgatgccagggaaacacatggtagaaggagagaactgattcatacaagttgagtcctcccagttcaatagaagatacatagatagatagatagatagatagatagatagatagatagatagataagaaaatatataataataaaagactaaggcaaaaatccaaccttatcaacacctctcttccctagtcacccatttcttaagcccctttgaagcaaaattcctcaaaagagcagtctaaattccctgtttttcaaagccactttcagtttcttcttttatctttctctctgaaattatggtctccagtgccctgacatccacactggtaaattcagtcatcacttttcacttagctgaaacaaacgtcagcatttgaagcacttgtccaatgccccatgtctattgctttttcttctgcttccattgttgctttctcagtcatccctcccctggttgtgacttgtatccaagctcctgctgttgaagtgacctaagacactttggagctcttccctatccatagacactcatttggtgagttcttccctagggtaccttcaaatactccctatatgataatgagtctccaaagtatccctccaatctagatgtgtcctctaattgcttacttcctcctggacattgtcctttataaagacttaccatatccaaaatccagctccacatcaccccaatcccacacaaaaacctgctctactcataatctctctatggctgttgataagtttatcattcaaatcattcaggtcaaaagattggaaggtcttttatgctgtttatccaaacatcaagaagttctgctccttctgcttccaagacaaacctagaatctggcctattatcacatgattactggtctccttgatagcagcagcagcagcagcagcagcagcagaagcaacagcagcagctctcatttaggtgactgcaacactccgaagcctgtgtgtcttaaccaaagcaggaccatgaattgcccctccaggctctttgtctcattctgatcccgtttcctgcttccacactcattccactgtttagatgcatcaatatgctactcgtcatacttctgcagagtctcttacctacaaaggtttttcctcaagattcagatgataattcctcttgtctataatgtttcccttgaatgccttctctctggtgagatccaccatgactcctgaatttaaagctgaagtccatactccttacttttctcattgatttgacaagagagataacaagagaggtgacaaaaattacttaaagaaagaaggtttagtttggttgacagtttaatggtacagccccatatggcggggatgacagggagtatgaggcagttggtcactgcatccacagtcagaaagccaagaggatgaacactggagctcagggagcttttcccttctcaaccagtctggaactcaagctcagggacaatgctgcccatatttaaggcggtctttccttttctgttaaacttctctggaaacacccactggtgttcccatggtgattcctaatcaagccaagttgatgatgaagacttaccatcacacagccatgtactcccagcccctgtcatttgcagtcactattttcctccagcacttaccacctcttacacgaggttatacaatttcttcttcactataatctatcagctgtgtcttttcaataggttataaactctgcagtggtgggaattattggttttcattaatgcatcccaaagatccacatggcaggccctcagcaaatattctacagagagttcaaagtccaataagatcaagcaagttaaagaataattattgagaatcttaaaatgattagtattgagacttttgttgatacattttaaatgttttttcctattctctttcttttaaaaagtagaatcataacaattattttgtagttttgttccttttttctttgactacactttgtggacaggttcttatatcattaaaattctttttctgcagggagttttgttctgaatctgtgtcagaatttgctgacttaagctccaaagtggaatatgaaatgattttgattttctttgctgttttgagcctataagttctgtcagaaacaatacttgggtgtttcagtgttctacgggaatagaaaattttacttaattccatatcctaagttgtataagaaatagaactgatgtgaacacccttttatagaagtctagacatgtgatctggtgctttccttacaataaactgttaaaagaaaaattattggacccaaaggtgtcaagaaaaagaaacttacaaaaattattcttcagtattaccaagctgcccttagaaaagttttagcaattaacacttccaccagcaagagaaggcatgcctgctatgtctgcccatagcagggtattcctttgaaaatgccaatttggtttaagggagtggagtagccagctcgttttaatcaatatttctatggtagctagtgcatttcagtggggtttttttgtaaaaaaaattaactccttagaatatatatacattctaaggaattaattaatatatatatatatatgaatatatatattcattctaaggagtttatttatataatattatataaattatataatatcaaacttcataggcttcctttatctgatcaccttccctttataaaaagacttctgcaaacaacttctggcactgcagccatctactgctgtgatccagagaacaggtggtggaggcttgaaggatttctgcaagaagagacaaaggaatgtggaaatgctggctgatgtagagtgataccaaaaaaaaatgtgtttggatgaggtttgtaggagtaagctgaggctgaagaactgagaggctaaattagagcatcagacataatcagtaaccagtcctcactcgactttctctcaacagcacttggcataattgattctctcttcatctcccttctgaaactcacacctgggtttcctcctgcctcactagctctctcccagcatcctttgctgaagattttttcttcaaggttcacatttttaatgctggcgcggttccgtgactctctcatccatgatgtcccttttttgttttcatctagtttctgatttcatctgacttgtctcttggctgcagacactgtctgtatgctaacaactcagacagaactccagcccaggcctttgcccagaactacagacttggatgcccagcaagctgttgacatgtctacttggatgtctgctgtgcatttcaaacttaatatgtccaaatgcaagctgccggcccccctcgcctactctcatttatcctgaaaaacaaaacaaacaaaaataaaacaaatactacttctacttcaggatttcaacagcccctcaacttattttctcttctttagcagtaagaaaaacaatcttgattgcacaggccagatcagagttcagttctgtagaagcatctggtgccttccaaagttcttacaaaagatggtaagaacctgtgtgttccagatcctaccctgccaccctcccagcctcatctcttcctactcgttctctcatgttctctccacactggacacactggtttacccctgtgttcccctgcagatacagaaggtaccacctcactggtattcctattgctccacacagacacccctgggtttcttctcactcctttgggtctttactcatataccaccttcctagataaaccttctattggtaaaagtaaattgattaatttttaaaaataacactatgttcttccctcctgggagcctttatcctactgttctccactttcttaacatactagttgcaacattatgtttttaaccacttatttattgtctccctcccctggtaagactacatgcttcatagaaatggctgttttagcttaggaggtaaaggtgcctgtcagcagtttgacctcctagatgtactctgtgggaaagagaaccagctcccgcaaggtgtcctctgacctctgattgcgtgcatgcacacacatgcaataaatgaatgtatagattctataagattactgttggttattttcttatccccatcgttcagtctagccaacaaaagttgatgcattattgttgacaaagataagtaggtagatttgtaaaaattcctatgtagtgaaaatattaagactttctcatattctttttagaatttccagttggccttgtaacttgccttctgaaagctttttatcaccaaagagcttctctgttgctgtaaaaccagcattttccttattttcactctttgccttccccaccctgaatctggcatttgctttctcctatttcttttgtggttttccatttttcatttaacaacaatgacaaaaggaaaacaaacacccacattcaaatctaaagtttgtcttaccatactgagtgtcatcagtatacaactttatcctttctgaacaagctacttactgtattctgatgctagatgcaatcacctacaaaatcaataattccgtttacgatgatgatgatgatgatgatgatgatgatgatgatgatgatttcttggcccttattaagtaatcttctgagctggatctcctgaaagcaatgttctggcctgaagaagcatcattgacctctaagccttctttctgtgatggcctttgtcttcattagggtttctatcaactctcataaggaaaacacttgattggggtggcttgcttacgctttcagaggttcagttcattgtcatcgtggtggggagcatggcagcatgcaggcagacatgatgctggtggctacatcttggtcagaaggcaacagaaagtggagaattttgagcataggagaactcaaagcccacccccaccatgacacactttctccaacaaggccacacctacgtgagcaaagccataactcctaatagtactattcccattggtggccactttctttcaaatcacagaagccttcagcataaatggaaggaattggctttgggtttgctacaaagtctgcaaatatcattttgaattagattatcatatttaaaaataggtgtaggatcaattaaggaaaacaagtaagtagtctcagagagtttaataatatgtctatttgtccaagttgtagaacataaaaaaaaaataagtagaatggcaaaactagactaactgggccccataacaaggctgaattatatttgattcttgattctgtagctcagccatgtgaatttactccctctgaaatacccatctattcataaatttaatatgcctatgagatagccccagatttagggaggggtcgtctacttgtactttcctcctatcttcagaggccatacaaccaaagtgggggttcttccagatgctctctatatcaactcaattgtgtacttaagtggtgagaaagtgactgtaggataataggcagcaattggctgcactgtgacatggatttgatccaaaattccatctaccaaccactctctaaaagtcatcactgggtcattccagatctcctggtttcatgatcccctcagtctccttgtctaactttctaaaggcatccagatattttcctttccaatcattgctgctctactgtggaaaccaggtctctctgaagaaagatgtgctctgaagaaagcctatcatgtatgttatacatggaggaaggcactgccaagtccttcctccagagattagatcttcaatttaatcatagtgcagggaactctagattcacaagtcacttggacctgggaacacaattagggtcctgatatttccatggtgacagcagacatcatacttctgctcaccagtcagtgatatttttgtttcataaactgagcattatctggcttgactgccaatctaatgcactgctctttggtaacacgaggatgtattaataaccatgccaggtgggtatgggtaaaggtagctgactgcctcaccatacttgatatgtatcacagtaattacatcattatggtctattaattcctgctttgttgcttttgacattgggaaatttcattcaaagttaggagcctgttaggagcacaatctagttgtagcaactgagtgatgcaggggacatccatgtagtaacctggggccaattgtccttcacagaaagcagacgcttgtgtttataaagggcagggactataaatttaggtagaattttgccacaggaaatgacagctcgcttcttactcatctctactctggacctcctgaataccttgatggctgtgatcctgctgggaagctttctagtctaagggaattcactcaacagagtgaattctggatcctattgtgaaaacaatgactagtttgtgcctaggctaatttagacccagtgttgaaatccttgctaaaacttcttttgcacaactcaaggctttttgatctttctccaaaatatatttgactgtgatagtcactggtttcataaaaataccatgtggatcaaagaacagttcaaattagattggaatcgtgtttttgttagaagccaaagataccactcaaagcatcacagaacgatgtctgcaatactcctgagaccaatgtaatcaagtctgcatcttcctttacatttcatttacatttcagtaacctctcagccaagaccagtggttctcaccctgtgagtctctatcaccttggggtagcatatcagatgtcctgcatatcagaaactttcattaggaaaattacagttatgaagtagcaatggaataattttatgtctgggggtcaccatagcattaggaattgtattaaagggtcacagcattaggaaggttgagaaccactggcctagactctcagctgctatttgctgttgctgtttccacagcattgcaggttacatctgacactcttgaattcatcttgcttttgctcttaaaataacattgagatatatatatatatatggaacctgtgtcatattgtatgattgtcctacaatgtcacacctctgggtacattcatgaccagatatgtggggacagtgtctggggattcagacagaattgccaagtccagtctgtatctaccaaaccgtcttctggcctgatgctacagtctgagctagaagcacgtggcaaggccttcacagaactaggaagttacaggggggctcttcttaaagagctgtgttgatagcacagatgcattcagccttgttctttatttctttagttttccttttttaaatttaacttagaaacaatcttattttacatataaatcccaattccctccccctcccattctcccatggcccccactgacccccatccctcttctgctccatagaaagggtgagaccttctatgggggatcatcaaactctgccacatcatttggggcagggcctaggccctcccccatgtgtctaggctgagagagtatccctccatggggaatgggctcccagtgtccattcgtacactaagtataaatgctgttccattaccaggggccccatagactgcccaggcctcctaactgacacccacatgcagggggcctggttccatcctatgctggtttccaagctgtcaatctggggtccatgagctcccccttgttcaggtcagctgtttctgtgggtttcccagcacagtcttgacccctttgctcatcacccctacctttctgcagctggattccaggaattccgctcagtacttagctgtgggtctctgcttctatttccatcaattattggattgtgggatttaaatgatggaaatccaatgagaaatggcttaagaaagggcattactgatccgagtgtctgaagaattagggatgaactcagacctaaggcatagacattcatgttggcttctggtttctactggagcttggcttttgtcttcaacaggctttaccagaaaaatatacactgtagactcacagcactgtgtccagttctcctttgccacagtctgaaccaaaggtgtaaacttggttctcattgggtcagacacttgaccctgagtccttcaccaagaccaaagtgattaggtgtgctacatgatgggatgagccagaatcaggaccaccaagcattccaaatgtggaagtgatgagcaacccccccaacaaaagaatcttctgctaatatcctaaaaacaagtcttcaaaggtagagccatgaggaagtcctaccatatttatcctgaccaacccactcttctctctgctatggcctccatagggcaaccactcatgcctagatatatctgccacatctgcaaatcaattaattgcttttcagaattaatttccccgattctaaagaaaagaggtgctatctgctattagttttcttttgaaagcacatacatccgtttttcttcctcttcttcatgttaagaagaaactgtgcatttacatttgcaaaaataaataaccattacaaatggaaagcataatctgcactgttgagctgatgcttacacagataaaaccaaatgtttaataaataaacacagtagtatacctacagactcatacataaaattctatcaaatcaaaatcacagtaagatgtcacctcaactttcagaatggctgttattaaaaaaaaaaaaagacagtctgaggatatggagcaattggaactcttatgcagtgtaggcaggaaggggaaaagggtgcatctgctttagaaagagtgtggggagctcacaagatggctcagttggaaaaggtgcttgtggctaagcctaacaaactgagttcgattcctgggacacacacagcggatttagccatctaaacaatccctaacaatcctctatatcagtgcttttcaaccatcctagtgttgtgaccttttaatacagttcctcgtgttgtggtgctcaccaaccataaaattattttcgttgctacttcataacagtaattttgctagtgttatgaattgtaatgtaaatatctgtatttttggtggtcttaggtaccccctgtgaaagagtctttcaacccgggaagatgacctgatccataggttgagagctggtgcagacagaaacaaagtatcacacacttaaattttaagaggaaggctcttatgtaaagtgttttcgatgtgtttgttttgctttgtctttgagacagtctcactgtgcaaccatttcaggtttcatgatgagtgttttttttttttccatgctgtttagataaatagaataacccacatagaattaaacagttttcttaagaaaactgtgaaaaataatgaagccgtccatccagttctgtcctccatggattgtgtgaaccagtaaatggagctgcagcttgttcccagagctcccttctaccgtgcgtgtcttgggtaacattcttagatcctttctttttagcctgttttctagttcttggagggacatatgccttttgtcaggtaagcataccttggctgactctggtaaagcatagacagccatgcaacttgcttacctctcaaacagctcccccacacacacacacacactcgcctcttttcttcttttttgttttttacttcatctacctgccttccttccctttctgattcttcctctgtctgctgctctctgtgtgtctgtctgtctgcctctctgtctgtctgtatctcccttcttctttctcttcctccctccctctccctacctctctctgacatccttctttaaaatgaaagtttcctaatgacaaaagctgtgttgttgttagtacggtaaacttccaaaggttttttatctaaataaaatgtctaagttttgttatgcaagacctagttcctgttagcaagagaacagggtgctaatgtggacacagacggggaggagctcaggctgcaccagtgtgcatgggtgggaggacactggcgaggataatggaaggcaagagagacatcaagaacatgacagagactaaggagggagggctccaaactatgctgtgtgcacagagtgaagagaatctgagaggatatgggctgattccttctctgcatggtggatgcatgtgtgaccagctaatccaggtggagcaacccccgtctgaagtccaaaatatctcaaaattcaacagtctgggttcagacgtaatgctacaaatacgaagagtcgaaattaaaatgaaggtacactaaaaatactacataaaattcccttcaatccttgtgtataaggtattcataaaacttacttacatttgagcctcatctccatgatatctcattataaatatgcaaatgcactaaaggaaaaaaaacaaaaacaagaaaacctgaaacccgtctgaccccaaatgttctagattaaggcagctaaccctgaagtgaaatcatttatcttccggaccacactgacaagccctcccagatgccgcgtgtacagggaaggtgatgggaaccaaaatgaacctctgagatgcaaagtggtgagagctgcaaatgtgaactcagaaaaagaatgcacacacagactctttcctcgtgtacccataaaggggccagaagtaaacttggaaaacaaaacccacatatgaagcaaacaatggaaagtatccctccctcccaagtcaacagatgagctccctggtctatcccccacccacagtgactcttgagagacccagccaggagccagctcccatctgctttcattattttatgatgtagtacaggaagatacttgaaatttctaagaactagaaatatgaaatgtggtccagccaggatttttttaaaacccaggcagtaggctttctgcccacagctctcccatctgccccaggaatggtgcccatttgtaccacactgattgtggctgcggggttttaattggtactgaacacacaaagcaaatagcacagatgcagcccctctgagagctgaggttgaatccagccatagagaggggctttcaactcagccactgtgggcggaaggatgtctccatcctgtgtgttttctcttttacccacttggccagggttctgggacagctgactcaggtggtacccaacttaggctgagccttagaaacacctggtgatcttgggacgccaacaggccctaaaagtatcctcagatcaaaacagtcacagccccaaactggggataccaggagcatcagtgcttttaaaacagtttcctgacagtaaaggacagatgaggtgaggcctgctgagctccctggaaaattctccttgcccttcaatcactctttctttactccctttttctccctctcccccctttcttctccttttccattttctctttccctttcttgctccttctgattctagatttgtgacagtgtctgtcttccccggaatatccccattctacttttgttaagttaaaaattccttaattttttttcctgctaccactaccacaattaacagggtaatatgtctgatgtaataaaaagaaaaagacaaagctacaacagattttttttaaaaaaaaagaccccaggaatgtacatctcattgacactacattgcattaatcagcagctgtactttttaagccccgaaagggtcacaacccacaggtttggaactgctgctctaatgcatttgggacaactgtcttaaagtaacttgcagcttttctgacagctccttgctctctctctctcctgctaagaaatgtagccctttcctgctgttttttaaagccttctgctaccacatctacgacttctcccatcagagtcacagccatcaccatagcgactgcctgagcttcttccaccaaaactgtctcccttcatgggcccataatttgattgctgttatccctataatttccaaagtcactatgctaccgccatcaccatagctacctccaccaaaattcctttcttcgttgtaaccatcatttcctcctactctgtcaccactgtatccaccaccttggtttggtttccatagcctggcccaccactgccgtagtctcctctactactataaccagatatcactaacataattgccatcctcacctccaaatccattctctccaccatcaccacctccatcactacctctgctgccaccacctccaccaccgtagctgcttcttccaccaaagttcccaacacaaccaaaattacctcccccacccccaagagagttcaccatggcccataaagttgccagatccacctacatggccttgtcgccatcccacggtctgcatctcttgtttagaatgggtcttttccatttcacaattatgccagttaatagtgtggcatttctgcataacaattttatcaactgcgtcatgattacccaaagttacgcaagcaagtcctctctttgttccagtctgcctgtcttctgtaacttctatggtttcaatcttgccatacttttcaaagtagtctctcagattatattcttctgtattttctttaattccacagacaaaaatattttcactattaaataggaagcaggctttacagaatcctctgtagggatggctccctttgattccagcacatacccatcatccttgtgtggccaagcacacattgcagcattcaccttttcaacacaagaccaaagcccctggaacattttgtttggagatctctcattaccacacagtctttaagtgtgccccatttctccaaatgttcccttaagctgtcatctgtggtttcaaagctcagaccaccaataaatagctcacttgaccattctggttcctttggatcatggccctcccttttaagaccttttgcctctttccacttgcattcagtatcccatcctgcttttaaatatcaaaatattttctgagctcgtgtgttctgttttgaagcatttttccccagggataacgtgggcctttttttttttttgatccatgaatttatagagtgatctgaagcactgttcatctgtaggtgttatctatcttatttctgactcttggaataacagaaaagttagcagatgactaaagaagctggagaaatccagacagatgccttctgcccccccccattattgaaatgaatatgtgcacccatgtttagggtcagtaggattccaggccctcctggggagaggatgggaattgattcattgaatggacatctggtccatgggagcacagatcagacacatacacacccatgagggagcagacgaaggataaagattttccaaatctacaggcaagttcccaagtctttgtgaagttggacctagaaatttgaactcgtaacaagttccctctaagaataaagggtcagagtcaccgtggaaatcacttcctagttcccagagctgatttgagaaggtgccattctggggacaatagacaacattagatagtaatgaaaaaaggccaagcatcaaagtgctttcctctgttaaactgtttaaccccgacaagaacctctatggtgaatctataactatttcacctgtagagataaggaactgagctcaagtgactgttttttagacctactgtgttagtggcagggctggaatcatagataattttcatctatcccctataccaactttaaatattcaggactcttagccaggctgacactgaactcctgctgtgttttgtgcatggcctctgtttcagcaggtccatagtagtgcggtagggccatgaggattggtacatgcttgacatctggatttctgggttgggcagagtaagaggccatgattcacagtacttttcactttctgtggttcagatgtagctgacagaggaatcaggaaaaagagtgtacagagggctctggtgagctggtgagctgagggaaaaagagtgtacagagggctctggtgagctggtgagctgagggaaatagagtgtacagagggctctggtgagctggtaggagccactttcacttctacatcagatgcagcttccactgccttgtgattcacagcctgctgttggacaccaacagccaaggtcattgtgcagacatgaagctgtttccatggaagaatggacattatgaatggagcaggaagatgcttgttggaaatgaataagaccccagtaggaaccttgccattcccctgaacctgaagaggagaaggtcttgctgtcctcatgggtctgacttaccgggatccttgacacggcccggctcatgtcaaccatatacattcactcagggcttcctctgctccccacaatcatggatgaggagaaagagctccttggaacatcatgtttctaagccttgtggctcaaatctctcaaccaatgagaaaaccatcatagagatactgctcaaaagcaggacattgtctagctacctttcagtgtgtagtttctacttccttcactaccctgatccaccccagatgcataagcaactcacccacatacagtaattcataccttccattgatcttagtagatcaaaaaatagtagaaaatgaaacagtgtagtagcttaaggggagctttgctgtccttcagtctagagtttcaaccctggccttttcttgtgattctgggcaaccctatctcatccaatagcttcaaataagcagaaagaagcccaaaccaaactggcctgaactgaaatgtaattactgtcccacaaagattatgaggtctggaaacacagtgtgcctttgatgcctgttgcaagggtcagtgtcacctggatctgagtcttggtcctcagcagttaaatctacaccctctggtttaatcctgttcctttactgtagctccagaggctccagcttccatgaaaacaagtaccataagagactaaattttcctattaacttaggcaaaagactcagatttagtacagatagagcctgattgtgggtcatatatccatccatcagccaatcactgtcttcagaagacaattaatgttctggtttaccaaactgaagtcacacgccatacctgttgctgaggacagacctggttcatgtggtagaaagtggggggaacaaattctgcatagttgaaaaaataccaaatacttgctccagaaaagttatttaaaaatgatatacccatagaaaacacttaggaaaacacaaagcactccatgcttggcacatgaaggaagtactcaataaatgtcagcacttagcgatgctgtcctcactaagtccataccttctgcatcctagcttgtatacttgaaattgcagaaagaaagctagactgtacacgtgcttgagtccagattgtcatggcagaaatgtgatgcctttgatttctttccctcaaagacacttttgatattaggatcttgatggttcagacagtcacctccatagtgaacttcatggatgcagaggtggagtagctgtacggctcacacaaatcagcgccactcttagtttcctaagatctactctccacatatctcacatcccacaacttcagacattggggagaacagtttccgtgtgagctgaactattgaagaatgatgccatcccatcaggcttcattcattgcagaaatgaagatactgcctcttcagtaggattgtttgaaaagccgagtgataagaaattggagatgacaatatgttatcagtagatactgtttctagacccttagaatagaaataactcatttaatcgtcatcacagccatatgcaagttatacttctggtatctccatttgacagatgacaaaaatgaggcagagaggagtgaaaatttgcataagtgcatagaaatgacgaatgtgttaaaattaagatttgactgtttcagggggctccagagtctgagcttgcagctatttggttccaacctctgaagtatgagcatgtccataaatgcacacaggtccatgccgccacagcaagaacaacatgctgaatgttttgagtgtctgctatatatgagcaccaggcactaagtgtattgctgacttctaagagaaaattcagtaacaatccctctttctctccacttgagcacaatgagatgaagccttatgccttgtcttggttccatcaaaggctgtgttgatggcctgtgctgccacctgaaaccatgttgatgtccatggcctgcactgtctccaagaatcatcatgatgaataagaccccagtaggaaccttgccattcccctgaacctgaagaggagaaggtcttgctgtcctcatgggtctgacttaccatgttgatgtccatggcctgcactgtctccaagaatcatgatggtgtctatggtctgtactgcggccagaggctgtgtagatgtccatggtccaggctcctgctagaggccacattgatgtctgtagtccatgttaccaccaaaggccatatggatgtttgctgtgggaatgcattctgccaatagctttggggtaccagccttagggcatggcctggggtgctacatgagggactaataagcctgctaggaaagcgcacttgctttctcttattctgtcttggcttggtgtggtgggagacccaagggggtggagagtcagtgcgtgatcaaaaatgacttcagaattaccttgtatctgtgagtttgtccttttaattgcacatcttaataaattggtttttatacctttgtgagttcacacatcagatatttgtggtctgtgcttccaggaagggccatgagggtccacattgtggcccaaggcctgccttattgatgtctgtggttggtactgacaccataaaccatatggaagttcataattcatgctgccaccgactgtaaagagcagggaagcctcttttacagtggtattgatgactgcagacccaaagttgaaaatgagagacatggaaggctctgggacaacctccaacccccacccccacccaaaagagaaacagtctagacaggatgaaattaaagagagcctttaaaaattgtgatagagatcctgaaggtagctcttcacagttgatggtttctggcaggggtgagggtggagaaggacacagttttctttaaggggctggtcactgggggtttgaccatgctccactgagtatgcggacaacacaatttcttttcttctttgagggagtcacaagcatgggggtggatttgggaagactgggaagtgatcagaatgcattatgtggaactccaaaatactcaataaaaatatagtttggggggaaaaaagaatttcagtgtagggccaataaatgtaatgtgtcaaatacaatagaaaattctagaaatattctaatttctgaatgggagagaagctaagcctttgggagcaccatgaaggcaaatagtctacaagttcctaaggatacctctagactactggttgatgaggctctgggatgggctaccaataacacatttttgctgtgcactgatttaaagtttacaaagctccatttcatacattttgtctctttggcacacacacacacatgtgtgcatgagcacacatgcacacacacacactcacacacagacgcacacacatacacacacagagaagtagaatggttatcacttttcaacacatggcaatgctgaggttcagataaggccccagaccttaaacagatccagtgtctccattgtgttctgctgttcccaacatcccctctatttctgcttattctccatgtgacataaatgatggccatttatgcatgactcctgctgtggcctggtgggaagttaaattactttgctttaaaagagtaagtcaactatgcccatgacctttttatcacaatgatacccctgtaacctgctgcagatttttgttgtttttgttcattggtgtattaataacccttctatgaacatctgtgtgtcaattgcagcaacccatgtcttgacttctggaaggatggttgtcagctgggaccttcttcaatagtcaaactagatcaggacattttattccaccctatgcacttctaggttgctgaatcaatcttgcagggatttcaaaagaaactgtcttctcaatctcatagtctccttcaacagtaataaaatacttggaagcaaaggtgtgcaagacaaaggacatgtcctacgaatgctttctcttcagatctgtcaataaaataataattctaagtgttttcttctgcctgcatgtgtgcccacttttatttccttgcacagtagaaatcccctttgtgttccagatgtcacagcctgcaattctggtctgatgtggcctttgttggatctcttctgtatcccccagcttcccttgctcagcacttgcatttgtaaccatgattttataattcttaagaattaatttaagcaacaatagcaattgcttctctagttttcaaggaaataagcacttgttttttatttaaaaatatactttatatttttatattttaagataaaattaaaacaagatggttttctatggtgtgatatcaaatttgacttcccatcttaagctggtaactgcattgagaacaagaagactaaagagggtgtgtgttctctgagtcctcctggccccctcccaggatagaccaggtggaaacttcatgcctggttctccaacctcttatgtcagtaattgcttgaattattctgttccccaaggtccttgtcaattcagcatccttctctcatgatcaggcaggcatgttttatcaacactaattgcagatgcagtaacttctgtatctgtgttctcgtttcctcctactgcaagaatttttgcagggaaaatagaagaaaggccagctacaagttgactgactgtccatttggtattccttacccttgactcccaaattgatatttctctctgacttcatatctctttggtttcctcaagattctcaactagtggagagattttatgtgggtcctgtaggctagcatctaggcttatcattgtacctgcccagaaagaaacccctgggactctgttaaagctggtggatatggggtcaaatgagggaaaccgggggatgggaaacccatagattccttttctatggtgacaatcagagaagaaaatgatacatgttatactccatgtgcatatatttgttcaaggaatgtacacattaatctatctcagcaatgcctcacatagttgaacttgttcctacacagataaaaaagatgaagagattttcttcaattaaaaagcttctttataattgatcagtttgacttttttaaatgtagacaatttatgtcctctgcattggtaaatttggatagaaaagtgacttaccattcccaaccacttaattccatacccttttgttcaagtctttgtgtcatgattgaaccccagacgtcattgcctggccccaaggcaagggaaaagaagtagagcccaccaggtcagcagtttatctcgcttccagaagctccctcataacctccaaacaggttgacatccaaactctaggctcagaataaggagttcctaactaaactctgttgtcaataggacatctggtgaactttgatttgaaaatatgggttgacatgtgcttgggtctatgaatttgaaacttagttcttcagctgttatctgtgtgatgctgggtccgctattcaatctctgtaggcttcctttgctgcactgctgtgttgaatgaattgaacaataatgtttatcaattcttgatgaatgtgttcacactcaacacatagcaatttctcaacagagatactcttatgttaaattatcatatggtgcaaaaaaacaaaacaaaatgaaaattgcctgtaggaagacaccctagccccgctcaatagtcctgggacaggtgccaggtggacccgggacttgcccataagggcgtggtgaaggaaagccggggtgacgtaagggaagcttcttaagagcttcatgtggagaccctagcctcttctctctggccgcgctagctgggttcctgtgacctcgctctgacctgcattttgccctggtgctttcttgaataaagaaatcttaccatcacagactatagttcatctctgtgtgcacgtggtaatcttaagaattgcctaacaattttagtcctgttagactcattaatgcaggcctattcggtaatgggtctttcagttctcttcttgccatcctatcaaagtaacagtgtagcgtcaacagccctaatcaagcctctgatatgatactttctctatcgaccccacttttttggtaagtaggtgaacacacatgtaatttcatccatttcttaggcatttggagtagaaactggaggaaactggaggctccatgagatgtcactgctttcctatggactgcaagcctttgaaaggcctgcatagctatccccaaagcctgaagaaaagatcctaaacagtgttcacctgaccacagcagaagacaggaaactagcctgtcatggtaatcaatgtttaaacacatatgtcccattagttcccccccccttttttgtcaacttgacacaagctagagttttctgggaaaagcaataccaattgaaaagtgcctttaccagattaccctgtaggcaagtctatggggcatttcctttattaatgattaatgtgggagggccaagcgtgctgtgggtggtacccttccttggcaggtggttctgagatatataagaaagcaaactgagcaaggcaggataaaggcagtgagctgcacccatctatgacctctgcttcagttcctgccttcagattcttgccctgaactcctgtcttccttttataagggaccatgactgggatgcgcaagccaaataaaccctttcctccccatgtccctttaggttgtggactttatcacaagcaacaaaaagctaacaaagacagcatataaacatcctggatgtatttacatcattagccccatgacattgatatactctgtttggaggaaatctttctgaggcactaaatggtgtatcagaaataattgctcattccctgtgacagtgtatttcaagaggtctctctgggaacaccatgattaatgtctatttaaaattcccccctcttttaccctttcacacctggttgtgtgttggagagggaagaatagacagtaattctaggacactgtggtactgagagcactcagtgaggatcctctcattcagtgttttcccctgtgtaccactcactctcccataggccagtaatagaaattccagagctgaccatgccaaatacctctccattcttaaagtcatttccttaattataaaacctactcaaatattaatcagaagccacaaggttgtccatatagagtccaccacctttctgtcctcattctacctcactcattataattcaacttgtataattatatatttgtgattttctatgcatgtacctacctataatattgatcttattcccataataagaatttcctagtcttcttcttaatctttcacttagtgataagtcctatagtggtttgaaataaaatgaccccaaagggagtagcactattaggaagtatggccttgttggaggaagtgtgtcactctgggggcaggctttgaagtctcttttgctcaagtttccctcagtgtgacagtcagttggcttcctgttgcctgtaagatataacaccctcagctccagcactacatctgtctgcagagtcaccatgttccctgtcatgatgataatgaactgaacttctgaaactgtaagccagccaccccaattaaatgttttcttaataagagttgtcatggtcatggtgtgtcttcacagtaataaaaaccctaagtctgtcctggatctatagtggtaggtctcctttgttctttttagtgcatgtatgcaagtccggaacatggatatatcctaatgtctaagaacaaacaaacaaaaaaatgtagtctgtgccttgacctaacatttggaagactgaggcagggggatcataagttcaaggctagcctcgatgaagtagcaagaccctttgtagaaaaagaaaaaaaaaaaaaactcagaatgttcatctgcatttggcttgctttctctatttttgccattagaaatttctttagtaaacatcttcaaacataatctgtgcagtggcatctcaaatgagatgcctagaaatgggaaaactggatcaaaggttgtgtgcctcgtatgctctgatagaaggtactgcctctctcagatcacaaacaaacctgccttggcctgcaacaaatgagcatgctcatccctctacctctttactaaactgaatgtttcaggctgtatggcttcttatagatccaaaaatttcttaagatgtttgtaaattatttcaaatcctatgttataggtgtgtgtgtgtgagagagagagagagagagagagagagagagagagagagagtatgcaggtacacaggtgtccatggaggtatctggtcccctgaatctggagttatagatggttgtgagccacctgacatggatactgagaagcaaactgaggttctctagaggaactcttaactctataagttttcctctatgaaacggcctggcttatcgatgtcattgttaaaaatgtctctagaataaaactcagggcagtctctgtattctactaagtgtcaggtacagagagcagattgtgaatgttctgaatcctgcttctcatggcattctgtaatgtaagtttcaattaagttggagattcattttacttgcatttccagtcaattaaagctgaaaagcatattttcacagggtctatttttaagtcacatctctccctcttcctaacatgcaaatcttttttgtcggctttactagttgaagtttttcagcccatgcacccatctgatgtttttatatctttactagagctgatgaattgttttgcttttgaaatccttttgtgtaacatattaatcatccttaccaattactaaagaaatactgaatcttcctgccaagttgagtctctctagcatactccataccttttagatctggtcttggaaatgacacagaatccgcttgtgagtctatcaagtccacagtcctctatccaggccagaggaaacagaccctatcattagccagaatgctacccagatgagctgaatatctgggtccactctatagttcctctcaacaaccatgctgaagtagaagacagggagatcaggtggctgtgtgatgctcttatttaatttcttaatgggaacatccaggtctctggttgtcaccacgttctcagtcctgaaagggttaagtgtttgaagtgctgatacagttgcatcatttcaaatatgctgctaagaggcaatgaaaagtctttctgccagtagggaccccaatcacatccctcctgccccattctatagccactgttgtcacactgtatgttatggtttcttgtatgtcctcccagacttttactaaagatgttcatagaaaacactgtggtgatgggaatttattcctgcctctagacttaaataataacagctttaatgcttttctacatcttaatctttgagttagtgaaacatcacaaggacatttcggtctctgcccatcaagctctttctctttcttcatttgcatttctgaccacgttttctcattaatgccattacatccttcatgcaagtgaaaaccttatcaaaagtttaaattttgtgacaaagtatgtgttcccgttataaaactgggcctccctgggctctgtagtcatatacttctctggtacacttacccatctgtctcattctaatctcaactgcttttccatcccttgcacagatgttggtggctacagatgtccttctcttggttttatagaaaatgggctctggggtctggggactctttctgttctccctgctttgggtggcatcaggcaaactgtagaaaatgctgactcacgctatggtcctcctggaacttagcattttcttcctgaatcctgacaagccagctgctaaatgatggattcaaaaaaagaaaagagaaaaaaataaagaaaagaaaaaagaaaaagtgctgtggagcaggaaccagcatgtgcctaaaatttgaacttcatcttttatgctttaagcaaactggctaacagttcttgcctttcagtgtttatatttttttaagtatctcaccgtatacataatcgagtaaatttaaacccttttattctcctattatatttatctgacaaaccttgggtttcatccattcatattgcacatatttttctactttcttatctgaatgtcctcctaataggttaaaaaaatcaaactgttcactcgcctccctggcttggctcccacaggtactgaagccttgtggtagcttggagccacttttctatttgtttgtatgtgaccctactgagaagagggactgagtcctagtctgtgctgtgtccctgtccccttagtgcacttcagagacatagcagtgttgagcaataactaaccagctggaggggtgtctaggaaatcagtctggcacaattggaagaagcagctaagatgctacgggcatgggacactgttggaggaagaaaggacagaagggagagggctgtttaccattagattatagtaggaaattaccaatacggtagagtcaggtagaaatataagggtatttaatagggaaaagccttacttacagagcgaaccagccagtcggtggtagtctgtacagcaagaagcaaagagaaactcactccgaccacgccctcacaagccaggtcaggtactcctgtagccagcccctaagaaggcgtggctacagttccacctacaattccccttttagtctaaaagaggattaaaacttaacagtataaaggtaaaatataagaagatacaacaatctgcttatgtcacctccaaactattttaactaaaccctaaagtcatctgaaagaggtgtccaagcctgaacacctccttccataccgaaccataaacaataggaagctattcctaactaggtatatacactatcctaagtgacaacaatggggaaagggggcgtagcattctccaagttacttcctgctgaaatgggacgatgatagccatgtggggtcctgtagaaagaaaatgttagtatccagtccatgttagatgggattcacttgattgaagatctcgattgaaatcctcaacttgattgaagtcagtacccaaacctcaagagaaaccaaaaccaaaacgcagtccccctactcactctgaccacaccctcacaagccaggtcaggtactcctgtagccagcccctaagaaggcgtggctacagcttcccctacattaggtggttactctgagacagtgaagagagcaggcgtggagtctgctttaccctggttccatttagtttcttctgtgtgctggctggtgtgccatgacctcaggcagatgaatggacgtgtttaacatcataacttcctccctccatcttctatgagtgttgtttataataactaccccacaaagtctttacaaatacttacagggaagctcctgcagtaatgaatgtaccccagagctcacaggaagtcccttccgttgtctctttctatcactgtacttcatgtttgttgcttagaattcttgtcttcgttgatattttctgcaagccttggcacttcttgaatggctctatctccaggtttttctttttcagtaagggtatcgtcccttcacactcccctggatgggattccctttctctaattgccaaatactcttttaaactttgaactcctagaagtccctctgcagcctcatatgtgtgacaatacctgccttctcttttcccaccaggaccattaacaactgtgctgttagcattttatttttgacagctccatcattgtggagctatcacctattttattgctctggcagcaataaaatagaacctatccttttatgaactttatgaaatctgtatcctgaaaggtcacagatgtgatttctaaagtatttttgaccatcagctcctaggaggaaagccactttatgtacatcttccctgagcatttcaaattaatctttcaattgtgagcttgtacaacaaccgcagtaataacagaaagtgcagaactagcatgtgtgtgtgtgtgtgtgtgtgtgtgtgtgtggggtacacacatgcatatccatgcgtagacagattgtgtacatgtgtagaaattcatgtcttgtgttttatcatacatacaaaattagaaataagcatgattcattgacgatattaaatatagacagattattggatataacccagtttcttatcctatgccaaaatattttgaaacactttttaaacattgtggatccctgcgaaggcccactacacccaggtttggcaagggatatagtttagagagaatttgatgagccttgtggtttacaaaattggaagaagtgctgatcaaagaattctacccttggaggcttcaagtgctattccagcaatcttcatcaaactgctttacagaggactccatgcgaagtgaaagcctctggaccactatgcatttggtcagctgtatcaaggggaattgtgggaggggatttttgcacatggtcattatggaaggtgatggctcagctctacatgactctttttctctttagcttcagactcactgtgtgtccatcatgtggtaggtgtcaccacattagtaagaaataagtagagtcttactgaacaatgcattcatcttcccaaaacctgcacaactatggaaagacaataatgccttgtgtttatttgattagagcctcacatttgcttagggaattcaccaggtgtgtttgtcaacagctatgttctattcctgtatctgccacagtaagttgttacaagccaggttgcttagaagtacaatgctttgtccttcaggtcttgaagtctgaaatctgaaatcaaagagtgactaagaccatgttaccttgaaaagctcaaagctttgaagttgccctgggattttcagtcttttcagtttttcagtgccccatggtgattggtgctccctatgccagctgtgacagtacccctgtctctgcctgtctccacacggccttcttccttcatgcagctgtgtcctttcctctcataagaatgccagtctatactgggcgtaactcaatatgctttcatctaaacttggttgcatgggccaaacaatatggcatttacattactggaatttaaattgaaacataaattgtaggaaaacacaatattatctctttttttgttttggttttttgagacagggtttctctgtgtagctttggagcctatcctggcactcgctctggagaccaggctggcctcaaactcacagagatctgcctgcctctgcctcccaagtactggaattaaagttgtgtgccaccaatgcccggctatattatctactgtgacaactaaaatataaaaataatggctagatatcttttccactctcccagtgtcccccactgggactgagttttcttggggaaaactcaaccctttctaataaatactactctaatattcgtgccttccttaatcaataaatcctcatttataggctcagctttcccccaagcttccagccacttctgtttccccatcccattcttcctagtaatcacccatatgccattttataattactgtattctcacaaagacacatcttttgtctgttatgaccaagcagtattttattgaatgttaccaaaaacaaggtgacatatgaaagagtgatttttatattcaatattgaacttaaggttcattctcaaactacgtactttgtttctgtaatgtttaagatgaatgaatgagtctagcaaagatctagggtttttaactttataggtatataaatgtatgaatgcacacatacaatatatggccaaataacttgttcaaaataattaatggtgacttggtttccttagagacagttggcaaaggttatctaacactgttcactttcaaacttggagctccaatttttgggtttgatggtgacctcgaggttgtcttggcacaaactttacattattttcctgcaatttctggtatcacacatttctccttgatcagatgagtaactacaaaatcaatgagtgcccatctcactaatcacccagccacagacacacattaagcagccatgacaaccaatgacaactctgagctgtgattgtccatcttcttatatccttccatcaatggcatacagaaggtctttctgaatggggtttgagtttctcaggaaataagcccagcagtagataaatgggaccttagaaaattcaaaagcttcttgacagcaaaggacagaattgagtgaagagacagcttactgaataggggaaaaatctttaccagccatccatcctattgaggattaatatctagaatcaacaaagaactaaaactgctaaaccaaaacttgggtaccgaggagtggtagtatgattatgtacatgtgtgaatatataaggagacccattattgtgtataatcaatgcaagctactaaaaataactaaaagtcaaaaaatatagaaagcttacatatatccacaggggggaaacattaacaactcagccaataaatgggctaaagaatgaacagacagttctcagatgatggaacagaaatgagcaaaaaacatatgaggaaatgttgaacctcaccaggcatcagaaaaattgaaattcaaactatatggatactccatctcatcccagtcagaatagaatcactaagaaaacaaaagcagggggtcagtggtggcgcacgcctttaatcccagcacttgggaggcagaggcagtcagatctctgtgagttcaagaccaccttggtctataagaactagttccaggacatgctctaaagaaaccctgtattgaaaaaccaaaaaagaaatgaaaagaaaaagaaaacaaaagtagccagcctttaattccagtactcactctggaggcagaggcagccagatctctgtgagttccaggacagccagggctacacagagaaatctcgtctcaaaacacagaaacaaacaaagagaacaaacccaaaaaatactgacacaggtgtagactaagtggaactccaatacacagccgctaggaacgtatactagcccagccagtacagaagtcactatggaggcttcttagaaaaccaaaagtagatctctcatgtgacctggggacaccactgttcactgtttacccaaaggactccacatcaacatatcaaagacatgtttgtgtacccatggttactgaaggactgctcacagtagctaagttatggaacaaagctagtcctccaaccatggaggactatatgaaggtggcattcatgtacaatgaagtttttcagatataaagaagaacaaaattaggtcattttccagaaaaatggatgtatctggagattgtcaaggtaagctggttaagccagtctcagaaatagtgtatctgaatcatcttccatgtggtttccagtttttatagatgtataaaatcatgtatgtacacatgctgtcaaagtctaaatgaaactctctaagggaacaaacaggaccaatatgggtggaatggagaaggaagagaggaggaatttgggtagggtataaaacatacaagaaatcattctcatgaaacacaatgcagtgcagtatgagtacaatacttacatgtaaaataagtctttaaataaaacaaaagacttattttgtatgtatgaatttttgccagattatatgtctgttctgcatgcatgcctggtacccatggaagtcaggaggagtccttagagcccctgaaacttgagttataggtagatgtgagccattatgtagttgctgggacttgaacctgtgtcctctgcatgagcaataagtgttcttaactgtggaaccatctctccagccctatttttttttaatttcatccaaaatgaaaaaaaaatgcacttcagatttgaacaatgcatggataggagtgtcttcctctgacttatttgccccaatcccgtcgtcgtcaaggcttgagcctcttctaaggagcccattgtgtcaacaatctagacctccttcagctatggttctctgcctgttggtcacaaccctttgggaccaaaggaccttttcacaggggtcaaatagaagatatcctacatatcagatatttgcattgtgattcataacagtagcaaaattacagttatggagtagcaatgaaaataattttatggttggggtcaccataacatgaagaactgtattaaagggtcacagtattaggaagactgagaaccgctgccctacagcctacctttgagagtcacaaatgaagtgagctattagaggaaaattttttaaaaaatccacccaggtcaagtagatgggttgaaacagaatttttaaaaaaatcacaatattcttttatttgatatgtgcctataatttttcctctcatttatttgggcccaataaaatctatgacttggattatagttttcatgtggcctaacattacatttaaacctgctcaggtcactatgggcagtgatagggtagtagagatggagactagatgttgcacacaaaattctggaatttagtaaagaagcctggcaaccaagttaattcttagtgtataacctcatttgtgtaaggctgagggttatgaaatgaggtcatgagaatggcactttccttgggagatgtggaagtaatacagcacactttaagggctacatcacagtgatgagtgtttagaaccttacacatgcccatatgtgttagcagggtgagtctgcctctaagaatctacaccaaagaagtgatttcaggtgtgacattaagatgtcccataagatcactctttctagcctttttttccaaaaattataccttgtcattataaacaataatattataaaataaaaaacactcatactattactaaacaaatagtgctttgcccataaaatgccactgaaaagttttcagtaatttatttcacgacataatacttgcttatgttaaacaaaaagaaagttgtcaaacagaacttaaacatttacatctgtactcacataaatgaaatagagagaatatcccacgaggttagctgaaagacatcctatccagtggcattatgaaaaatcttctttatttttaccacttttcactttctctgcagtgaatatgtagtacttttataattaggacatatacattactccaaatatccaataaaaaccctgtaagcgtggctcttttagatcagccatcaaggatatcccagattacatattgttatcagtcagtcccttctctataattgcatgagctttcttctggggccccttaaactcggtcacatctgttagttgtttacatccatctgagatttagcttagctgagtcttctatgattaggaaggcacttcagtgaagactgtagagcatctggtccttaaaacccttttctgtcattatgttgggaaagtgccccacaccaaacactttaatcaaccaggagtaccgttaacgttgtggtttttagatcattatagttgtcgtctgttctcaagaatcaacaagactttcaatggtctttgtcaatattaatagcatctaagtaagacaacaagagtataggtaagataccaaagcacatttgtgaaatttcagtgtatgtaacagacactaaaggtgtgtgtacagtggcttgggaggtggtggcctgtgacgtggtgccatttctctatgctacagacagctatgacattctgaatgtaatgttgggaaacgcaaaaggcttcggatctgagaacaccctccatttaaagactttgctgtaggtaagacatactgtatgagtatataagggcttaaatgtctctgtagctagatcaagggcttcagagtaacgccatctttttgattcaaatgttgactcagtggttgatgatccatggacagaatttggtacatatccattgcatgctgaaagagtgctggagagtccacagagtgagatgagttgcatggcttgaagcatcatcgttcagtgtctccctggtattggttttctcatcagcatgtatggagtttaatgctgccctttggctttcactcactaaggagtgtttgtgaaacagttcttccaatgcacccaaatcatgatcccctttaaattacattttggtgggctagatccacagttaagagtgctttctgtccttccaggggatcagagttcagtttccagcactcaaggcggatggctcacaaccacctctaactccagcctctaattcagctacagacagggcactttcattcccacagacacagatgcatatacaaacacaaaaataaaggcaatctgaaaacaaataattacaataaattacatgtttgaaattcacttaacttcaaattctgtggctgagaatgtctctttttagaagttatacatatttactgtgatacagagaacttgccgcactgagacagacacaacaaatgtgtcagagtaacttttctcttgccatgacaaaataccatgaccaaagctacttataaaagaaagcatttaattcggggcagggggggggtgggtgctcacagttccaaagggttagagtccgtggcacaggcaggcatggcattgtgccgggacagaagctgagagctcacatttgattcccaagtacggagcagaaagacagctaactgtaaatgacatggtttttttgaaacctcaaagccccattgctaccatgatatacctcctctaacaaggccacacctcctaatccttcccaaacagttctaccaactgagggggaagcattcaaacataacagcctctggagacattctcattcaaaccaccatgaaatgtgcttgaaaattcccctcccttatacctatgtaaaatccacagaggaaaccaacactgagcaaaactgtgggatagtgacatgcttacttttactaagaggaaattttttcttgctattcatattatgatatctttctaaggtctttactctgagcattgtatctccatctctgtaccatctttcctgttgcaatcatgtgccattaagcaaatgagccattgtggagtcccagaataggctgaccaattactggcataccaacctacaagtcaacttagtcaacctgtccagacttttgtgtactcatctgtaaaatgagacaaaaatacataacttgttggaattttgaaatgctttacatagtgtgcctgttgtggcttccatgtgggtgcaataaatgctggtttctttccttcttcacttttcttccttttttttctgtgctccagctctctgcaaggtaaatagctgatgattccacaattcattccaagcaaaaacatctggaggttgaatctttggaaggactttagaaaacttactttctgaaagcaagaactatgtaaaccagtaacgagttctgtgtcccttcatcttctatgaactaggcttttgctggaaggcgacctagagacagctggacagagccaactcttgctttgcataaagacacggacattgtgacccagaaaagatcagactgagctggtcaaaggccaagggtagctcagccacaacccagtcacttaggtggactgtcagaggaggggcacatgcctttctgtccttttctcccactcagcagtgacaaatttaatttaaaaatgaaaatgattaaaaatatgactctttggagaattctagatcttaagtatatttctttagttcctatcttcgatgcccaggctacagtagcctaatggtgataagaaccaagtggtagtgtttgaaaagctgaacttagagcatgtcctgagttactgtttgtagtgacactgtcctttgcttgtcctccactgaactcatttcctattgcagcaaaatatacaagaataagaatgtatgtccatgtgccatttgtaaagtgtgtgtttgctgtgtatacatgtgtttgttatacatgggtaatttatatattatttgttatatatatgatatgtgtggcatatatgtatggaatgtgtgatacatacatgtgatgtgtgtggcatgtatgtggtgtgtgtggtgaaaaatcatatgtatgggtagtatatgtgtagtatgtatgtaatgtgtgtgtgtgtgtgtgtgtgtgtgtgtgtgtgtgtgtgtgtgtagtgtatgataggtacaagccttctggttttatagcccagagaggcttatggtttgctgtttcttggcagacttcaaaagggaaccacctttcagacagcggtgagtttttggaaaagataaacagaaaagcatttacctgattgcagaaccatagccatcaacacctacaggacggggggaagctctgtggcacagaagtcagaaacatctcagtacatactgtcaattgattatcagcaaaatagcagggagagttcaatggaaaagtgagatatctcagtacataaagcacttgtcatgcaaacatgagggccagagttcagatcccagtacgagcataaaagccaagtgtggcaccctgtctataatcctgtcacccagagacagagacagggttttgcccaagcaagctagagaggcaacaagagatcatgtctcagtatttaagatggagtacacagagaggaatgcaccagatgttaacctctggccttcacacgcatgaatacacgtgcatgcgtaccccatgtgtatgtgcactcacacatgtaaacattcatggcatacatataaacatgacatacatatatacatgcaaaaatgaaaactggcaaattaactcattgttttaaaatgatgctaggattattagaaattagcatgtaattatcaaaaatataatttctacccatgtcttatagcatctataaaaagtaagtcaaaagatataacaagtttatgtgtaaaatgtaagtatataataattctataacaaagtaggagaaaaagtcactgtgccttatgttaaagatttaaaggtttcataggagaatcccaaaaattcaatatgagaaaggctacatgtgttatacatagatgttttcactgtccttggaagacaggcaggagggccaaaagctccatgccaggctcggctacatattgaaaccctgtcaatcagtcacttgattggtagataaggtaaaagcatgcttaatcaaaattaagaactcatgacttttgtaggagaataaaaacacaggttacacattggatggggctatttggaaatcatgaacctgaagaataaaaggggacttgtgcagtgtataagaagaactcagtgaggaaaagaaacaaaaggtgaggaaaagaacataagcagatgaaaattcagcctgatcagtcaccaggaaatgcaaagtaaaaccatgggatatgctacacctgctaaagcagctgaaattaagctaactgttaagcctaagtgctggtgaagacagggaaccatggagaatctggaacagctcaggcattttcttacattcacttagcatatgccccagtaacctcacacctaggtattacccacgctcaactgaatatttactgtagctttattcataatcaccaaaacctagaagcaactaaaatgtcttctaaatggagaatgaacaaactgtcgtcaatgcacacaatggaataatattcaataataagatgtgaaaagggatggaacactggagatagttatattaatagaaacaagccagactcagaaaggtaaatagcacattttctctcatctgaagaatctctcccccacccccgtgtgtgtgtgtgtgtgtgtgtgtgtgtgtgtgtgtgtgtgtgtgcgtgcgtgcgtacatatatactctttgtacaggaaaggagaaaggagaccatgagaaaggaaagaaagaaatgtaataaagggagagggaatagggagcaagagagcagagtatatgtactatgaatgcagaaggaagaccgggggcagtcagtggaggaataaaaacaaagtataattatggatatatagagaaacatcacagtgaaacccatttctttttatgctaaccaaaacttaattttaaaataacaatttaaaaaaaacagaaattaagtactagcacttataatgtaggtaagtctggcccagctttggtggcacacgcctttaatccccacactcgggaggcagaggcaggcagatctttgtgagttcaaggcaagcctggtctccagagtgagtgccaggacaggctccaaagctacacagagaaaccctgtctcgaaaacccaaaaaaaaaaaaaaagcaggtaagtctgagatacactgtactcactggaaaacggtctgagaagatcactattttgatagcattctgacaaaagaaaatgttcttgtgagtagggacccaaatgtcagaacagagccaggtagagcagacatgcgcatagaacctttgggaacaacagcatggtcttgggcagcatgagccattggctagcaaatggggagtcgaagctttagtccctctaagacacaggaagtgaaagggcctctcagagacaggaatctggaccgttggctcagatctgatttagactgtgcataatgaaactcactaaatatagtgggcagaaatagatgcaaggctgcccataaaacctccggccaaagctttggggtgggagagggaggggcaaaggaatactgcaaagcctgtctgtttgtggctttggttaaggttagatcctcactccttcccttccaaagaggcctctcgtagtcccgagctaagcagggaggataatggaagtcagcaaagccctttggcacgtgagttcataagccaccttgcctgcgttttcaatagatgttgagatttgtttgatcccacctcaccgccccgcaccgtgaaaccgtaaactttgcatcccagatggagcaaactggtccttgcgcttcttggactagttccttgacgcttcatacattttcctaaaaaccttttctcattttatctttagagtagccccatccaaccccgtttgcaaaggatgaggtctgtgtcatctccaggagatgcccacaatcctggatagcatcaagccctacaaactcagcaccccgatagaagtgtgatgtaaagttgagtccccaacttgggcatggtaagagagaaacaatgaccaccaagtaggacaattgtagcaggtacacacccatccttgttactggcgtgtatcttcctctccaaatcttacctgtcatattttcagaccacagtatgccactggggccaaggtgtcctccagcaagattgcaatgcctgtcggtcagtaagtggtacagagatgagccactccagcgacggtttcagggaacagtgtctgctttattgtatgagaacaaccgcttatgtagtggaaatttatctactgtgactggttagcacattaccttattctagacaatgagtgctcataccaccagggtctcttagcatgtaaaaggaaacttggggagtgcagactcatcagcaggtcagctattggttacctacactacttcagaactcagtgtactgacttctgggagtgctcaggagcatgaggtgccgtgcttctcattcagaagagcagtgtgccaggtaggctgggctgccaggtcatgcctgtgttttctcctacaatagcaaactacaggaagctcacaccagaggaggcaaagcttcgactaagcatgggcctaccgtgttagcacattcaaagccaacggcatcaacttagtttctgagttatttttaaaagaaatttaagactgagcatggcatcccaccatagggttttgtgcatggcaataggtaatggatctatttgcagtcttctgcatgttaacatccagttctgccagcaccatttgttaaagaggtttaccttttttcgatgtaccattttggcttctttgtcaaaaaacaggtgttgactcctcatgggagcccttacctgtgtgggaggaggtggggggggtggagggatgggagggagaactgtgtttggaatgtaaaatgaaatcaaaaaaattttaagtggaaaaaatgttttaaaaaaaagaaatttaacagaccccatgggctggtgatacagttcctgtggaagaggacttgcctagcttgcttgaggtcctggtttcagtcctaagtgccacatagacagggtagggtggggcatgcctgtgaccccagcacttgggagaggcaggaaggaacaccaaaagttcaaggtcaacctcagctgcatggtgagtttgaagtcatctgaccctctcaaaaaggtaaaaagtaaatagaaattgaacaaaatcctacctcatatttttatgcctgcctacatatgacagacatcagagcatagtgaccttctatttgaatttttaatctgcttttgtcaatgtcttcaatgacatggttaggatttcttccttttccctttatttatgttatagcataaatgttgccagctgatacgcgtgtgtgtcattaagagatgatgacaaagcctttatcaattcccttaactcatagtaaaagcgagcaaggcaagatgccattgaggcggggcccctcctttacttcacagtatttgttatatgccacccatcaaatgaggatgatagatgatggtctttcggaagaccaatcttccctcagcttaagcagctcttacacatcaacacagcaggctaacacagcagggctcccaggcatgctcactctgtcgggagaactcaataagctttcaccagctggttggcggttgtgaccaggactttcatctgtcagttctggtgcttggctccttcagaccactcatttgaagccatctttcccccgccccttgtgtctacagaacagtcttactaacattcgtcgaggatctgtcccagtacaccctcaccagtgaccattgtcaaacacctttctcacccacctaagatatatccccattctcagcttcaatccatatgcagacttacacagacgcctttgttttctagtagataatctttatgggttcaatccacatctgattcagtttttaatttcccctaatacttaaaagtgtgctttaggcatcaaagatactcaatacctgtacttattttgtaagttgatcctgaactcgagtaactagaattatgaaatatggctggatattgctccatttgcattttaagtgtggcaaggagacagtagaagccttagtcgctgaaatacaatatgactgatgctggggcctctgctcactgattccagagctctttcctgttgaaccctcctcatatggcctcagtctttctagaccatgcccctccaggaagccttatcagtctgtgcaagtagacacagctgcggaagctgtggcctttagaatccaaaggttaatactgtatctttgcctttgagcaaaatcttctaaatgttttacacacattaactactttacatccccacaaccccactaagcaaatgctgttattaaccccatttaacaaatgaagaagtgggagaagcagggtccagtcgcttatatcacacaactccagagccagggtagtaagccagggagcacagtctagcccaggagcatgtgctgtcataagcaaacctttgagagcagcccagaagtctctgttttctgttccattggtcagagctaagtcagtgtccacattaaaccaataactgacaaggaacacaagattagcatggagccaactcagtcaatcaagatttagccccaaactagaggtaagctcatcttaccaaagatatcaacaagctaaagtcctgtcccagagaataggaatgggactagggaaaagtactcacttctagagattgctccacacagcccagcttcacaaatcccatttcctctgtgacattgtagttatccatgcatgtatcttttcttcctccaacttgtttgcaagcatcccaaagataggaataaatatcacacatctgcaaatttcccattggccccagcataagactttacacgtagaaattattcaaggaatgcttgttcattgtaattgaatcttcattctgagttgactaattggcagggtcaacagttgaccatgctcaaggcagggagataatgcattttcacatagatcttataatcaaatgtgttcttaaatgcttctctcttgctgtgcaaaaatgcatgaaattgcacattaacataggtcagtgcaaaagcccaaacttattaaattgttagtgtcttgcactcagcacccttggagataacagtaatgtcatatgtttattgtgacttcacgattccactattttcaaagagacattgtattcaaaaaaacatacctcaaagagtcacagacaaagctaggtgggccacataatttacagggttcagttcagaaagatgatgtggtttggtaaatcaattgtggcctcccttgggcctattgttccaacctgcagggacagatggcttctaagagactgtaaccccccaatacctatgtgtctattgaatgtacagtaacagcaccacctcaagtggatcaatatgacattgtcttattgtcctataatacagaaggacacctgcctagcccccattcttcctgtacttataaatagagctttccctcccccaggcagaatgcaacattagagcctaagttacccatccccaacatgccatggatgcaacatcaaagaatgggcagaaggaggaagaggagtgagtctaaacaggatctggagcttggcatgtggatgaaaatctattctagaaagtccctggtccagggctccaaactccactgtcccatcatatgtcacacacaaacacaaattcaaagggaaaattaatcatttcaggtcagttataccaaagcattaagctccaacacttctaagcattgtatttcttagtgttctaatgtctgaacacttgcttccaaggtggtgacattttatgggaagactttagaaactgtggtgtagaagtcatagctggaagaggatgagggtggcttctgagggttacaggtaggggtagcctctgagagttataggcagaggtgtccagtgagggctatattcctgcccagttattgaccaagttcttcttcctggtctacaccctacacaaagctgctgttgcaagctcctaccaccacaggcaaagcatttcagtcttcctgccctccccaccaagctaaattgtactctctggaattgtgagtctagatacacctctctcctctcaagtttctcctgttgggtacttgatcacaacagggaaaggaaggaagtagctcagaccctgtacgatatatcacagtcatcatgtgctctggctatggccgcacagttcctggtttcaatccaataagccatttgcagggaagataaagcacattttcaaaaatgctactgtgaggagaaagaacatcactaaggctgtgtgtgaggggagaatcagataatggggagagtgctggctcactggatgcccagtcagtgtttcctgccgaaaaggaggctgagctgacttctgacgctgccctgtagacaggtactaaggaaccatctagcatgttagggtggttagggtgaagcaactgggtttgtgccatagatggagcctttaggcagcagagcagaggaagattcaagggaagagggtgatctactcaattgtctaaattgtaggtcagctgttgctcagatagatacactatgtttggtaatataatattaccaacatgtggttggtattgtagtccagtgctagaaattctgttagtgtcctgaggttacagtaaggttaaggaagttaaaggtggtcaagggtaagttagacatacctctgtgtaaacccaagttccactatgcataaatttgggcccacttggcttcttttcttttttttttcttttttttttttaagagacagtgtttctctttgtaacagtcctggttgtcctggaactagttttgtagactgggctggctatggactcacagagatctgactgcctctgcctccctagtgctggaattaaagtcatatgcctctaccctttgttttgctttgcatttaatctggtaaaacaagtgaattgcaatagggttttgtgagtgttagattaaataacagagaactgtgtgaaatgatacataggaatagtttagcacaatgcctggctcattaaacaaccattattaccataggagattagctgtttgcttctgtccccagctctgtttatacttgttctaaaacctctgtgcttccaacccagaggaaggaggaatgccccaaccagtcacccacctctgcactgctcagcgcttcaagattcgtctacgttataatattctactagctaagcgtagcctcaaggactggccatcaaaaatgtattgacgtctactttattgccaagtctctaatatgtgaagagaaacaaaagcctctttctgttcatagcttaattttaaaatgtattgtcttgtcaaagaaattatctcatttatttattcagatagcccctatcacccttacttacactctgtaaagaaaaaaactaaagattattaagttcagtaagaaataaaacacattcatttagtattcacagtatacaatcttcattaaataaagataactcgccattgctataatgctacaacgtgaaaattaatttctggtaatcctacttataggtgacatgtcagagtacacacaatttggtgtaaacaaccaaaccatttattcattagaaattccagaggcagctagcagccccgagggatgaagaattatctggaaattacagtgtaaaaaaaatacatggttgttaagacaaaaactcaggggccatgttcatctaagactagagacattaacagtggtgggggttttgagtcacacatgccaggtctgtagagggtgttctgggcacttgggattccatcaccattcccactgaggccaaagaatgagcaggggttacatctctgtggtctcctttgcactctggtcagttataggagttggccctgtactgagacaggagatggaggtcaaggtgaccccagcaaggatactcctcaaattttaacatgacattgaataaccagaaaattgcattgtaattcaaattaatgggtgggtataaggtgtcctttgcatggttgtattttaataagcttataggttctggatgctcatggcccatgaactccacttccagcagtgaggaaacccaggtttcctggtgggaactgtctggctggagcaagaaaaacccttttcacttaaaattgctgtcttgttctttttccatctgtgtgttttccatcctgacatccagagctatgatttctgaaaacaacgaacctgacttttatcatatttggcacattctttacatagaggagtgctaactgctctgggccaagccttgagttcacctagaaaaccctgtccttaccttcaaggaacaaatgtcatgggtaaatatccccagcaactatttttaagtatcttccattcttaggacaagaggatgcacagggaattacagaaccaatgactgtgtttaagccgtctgtgttttatcatctatgaaaatggataataacaaagacctcgaaggcttgcattcaggattaaataaatctaaagtctctgatatttacttagttgataaatagttacaataatctcctatattagaaagcgtatgtggaaaaatagaatacagagtattggaggttgttgctcaggaaacctcaccaaagtggcttttgtctcactaatgagatggtcacctgaagtttcgagaagagaacccaggacgaaaacagtcacttgaaagtttgagcaaaagggtgatattgttgggtttaccttcccctctccagcttttggcaaaggtgacatctccacaatttctgtctgcttctaacaagccaagaatctgactgcaagaagagaagtgaatttttgttagtcctgtcaaacaggtattgaactcgtaataaatattctgagggaatgtatttattccatagcaggcatgataaatggagggtgggttgaattctcatgagtctagggatgctagccaaatgagctgacctaaaagaagatggaaagtacctgggagagctaaagtaagagacctaacgtgtgtttaagcaaacttatacaagcagagaagtcatggagcttgccatcactggttcttgctcaccaccaccaacccttctgggaagaccgtacccccttgccagcacacccacaggccattggctgcctctctctgaaactaatgggctgccaagatcaccacctgtctcctgtcaaagttggctttgtattgcaaacgcctctctcttggctgaccatccttgcagtgcctccgtgggatttatcacatcaccgcgtccccaaactcctggcttgaagtctggccctcagctgatgacctgagcccctctcctagcaagaggtataggcttcttgaacataaaccagttctaatgtcttcaaaaaaaaaaaaaaacacacatagatgccagctttttaaatgaccatctgacatgcccagtgaagcggagctcatttccagatgatccccagctgtcacaacagcaccgtgcctgactggcacagtcatcacagaggcaaggagcgtgagttcttctcacatttgacctgacaacagcaattgtgattagagatcaacttgagatagtcggaacagctacttgtaattacatcaattaatgcacgttcattgctttactgtttatgaagcatggttatgtgcactgtcataatatgctacagagtgatggcatctgcagagagaacagagttgaactatttcactgcctgagcatagaggctgggaggaaacactccagctcttacatgcagggtatctaagcagatcgcaatgctaagcaagaaagaataagcattgtcattgccagactcaaaggggctgaaaagaaaatttgctgaatcatgaatctgagatgcacacatcatggaaggaggctccaaacaaggtgaaatcctataataaaatgtttgaggctaagggctgctgagcaactagttagctagaattgactgttctctgttttgtgtacagtataagtaacaagcttagtgttgcaacaaagcaaccactgaaaaccaagagaccacgcagtgaatctttggtttctctgctcagggtcttttctagccaaattactagtattctgctctactgctacctatattttctgcttctttccatttgaatccaggaaggacttagtggttctttgtccagcatacttcttcttgtggttgaggactaaccttttcctagccgttgatgacttgattatgaacttgcttgatgataaccacatttcctggagaaagtggtgctcatggttgtcttttgtcttgatctgaatggtaccaaattttcctatataatttgaaaagatttagtttggctattatcataccaacctaagctgagcccaatcatagttcaatatatctgcttatcttacttttccattgctgtgataagacactatgaccaaggcaacttataaaagaaagaatttatttgagacatacagtttaagatgccataattattatcctggtggggaacaaggcagaaggcaggcatagtgagggagcagtagctgagagcttatatcctgatccacaactagagagagagagagagtaggaatgactctagttttttgaaacctcaaaggctgcctctaggaacacacctccttcaacaaggccacacctcccaccctaatccttcccaagcagttccaccaactgaggactcattcaaatatatgagtccatagggggccattgtcattcaaaccaccgtactgccatttttatttgtcaattttgaatagctagtttctttccagtgcttctccctgaagagtcttgaggtgctggcttacagatatctttactcccccgctcttctgtccactccattggcctctaagtttcccttgcaggcagcaaacactcaatgcgtgcttgtgggatgagagctcttctagactatgatggggctccttgtgaacccaactgatcactaggctcatgtggctcttatgcatgaacccttgaagtatgaaaccatgtgttctgagcagaatctgagtgaaaggcatttctccccttgagagtaaacaagcaaatgttgaggggtatgctaatgacctgtgtggggatgactatgaagtgggggggaagggagctgtgtacatgatttatggcttttttcccatcctcagatttttcctagcaggtgaccctcctcccgagaaacaacttattgggattctttcttctaggatagtcctttcaagtctccccaaatggagagatcttacccattagtgctctaaggtctgaggtggaaattggttttggtttttgagcaaagccagaaggctgccagcttgggcaggacactaaatagatgtgagtcttccagcatagagaccaggacagaacaaggacatggaaatagtgcagaaaagtggccgaggagatgaatgccggcttggctagaatacactcagttggatttctctggaaagcttaagtgtcctgcctatcactgcccaaatgctatcctgacctagagatgagatgagtaataggaattagtacaggggatgagaattcatggggaaaggaatgaaattataggaaaacttcaagtggaattgacagaaatggtaaaaatgtatcagtagccttactattaatatggcagtaagagtagctatcatctgtccattcatgcctccatctatccatccatcctgcccacctttttataaagtggtttaaattagcttccaagaagtatgtagtgatataatagaaactatactaggagaaaaatatggaaatacaaggataaaagaccgaatggaaccaagagtgagactggctatgaagtttctatggctggaccatgtaaccgtgaaggcagaaacagaaacagacccagcttcctggtaaacctggtatctgccccacagctaccttgcctgactgtatggctatgtctagcttggactcagccacaccctgaagggctcagtggagtggcctctacatatatgcaaaggagtgaatgtgagtgttgtggacattaaaatccaagtagcaagcttgcttcagtagcataaggaaagatagcagaaagaatttgcgtaggtacagggaataaaaaccttgtcaggggttatgaaacagcaacattaagtttttcatggttgaaaaagcagcaaattttaaaaactttattttggaattaaaaaaaaatagatgtaaaagtatgttgacaccactgcctataggcttcttctcttatctgacatctccctctactgacagtatttgctggcttgcttttttttcccctctttgaaactcagcaggggagccctttgaaagtgacaagcctgtgaaatgcctttgagtcctggctcacaaagtggagaagggccaggtttggggagggaaatgataggtccatttgggaattgggggattggagccatctaagttcaatcaccaacagatccagtgtctggagatcagatgagagacccaaggcaaagcaggggtgggaaagtggtcaatgagagtggatgaaaggaaagagaagacagaacatgctctgactttgagagccccacagaaaggtcaggcagatgggccggaggaaaacaatacaaattccgtcattctctgaatgcctttttatagcatttcctaccgaggacactccatcaatgagtgctgtaactccagtgttggaaaactctgtccattattactactactaatgtattattggcatcttttgttattgttaccattgtctgaggagacagattctcccagcagcccaggctggccttgaactcaccatcttcctgcttcagccttccaagttctgagatcccaggcaggcaccaccatgcccagatggcaattctttttatttgagagctattactcttgagttatgatccgccttcctgccattctcatccctattccttattctaccattgggcatgataaagatagacagtctcattgcgaatttgctcagtaaatactttgcaaacaggaatcccaagagataaatatagccaaattggtaataccctcctccatttctaagcctcttcccaacatctcccagaagcccctgaggataaaaatcattgatgtttttcctttctccacagtcttgggcctgcgatgacttctgtgtcacaagaacttctccaccagcccttcagacattgcattgagtaaataaggcgcattaatttctccatttataggtgaagaaactgaggctcataaagatatgtgattgtatcagggaagccacagaaccaatgggttcctggctggaaaatgagacctccctgatgctggagactgggcatatgtatcagtgtgattctgcatctcctgcacatagacagtatcagacaaagaagcccatggtgccctgagcaaatggtggtaatatctatttggaaactgatacctggagtcaagaccgtataggaaaataagttaagattcagtaggctaagcttttctccctggcctttgcacagcctctgtagggaccaccccgcttactgccttgtgaccagaggctagcttttttgtgggttttttttttcttatggtttttcagtttgttgttgttgtttattttattttataatttttgagacagggtttctctgtatagctctggctgtcctggaactcgctctgtagaccaggctgccctggaactcagagatctacctgcttctgccgcccaagtgctggaattaaaggcatgtgtcaccactgcctggtaaatagctagactcccctaagtgactctgtctgtgacacagcctcccaacaaccctcactgccaaacaatccatcaagacagcagtcttgtggacctgaagttctgtcagtacttccagttccctggagcatgacagatttttttttatctaagataatttggttataactggccctccagaaatcaggtatacagccttagaagagttattcaaatgcttttgtagcaggcagtgactttgtctgagactatgagctaaaggcccaacgcagtacgtgccctgtactctgtaaatgagttacacaatctgtctagagaaactgaaaaatattgcttgttctttccaactggagatgagcagaggcaatggagacaactaaaggagaaaggggttacaggaaccacagagtaagaggctgtgggaccatggaaaccagagaatgaatatgatttcctgtttcagttttttagtgaatggggtcagattctctgtcttgcaattggcgaagagattcaagggtctttgaaactccttcgtggcaagtgggaatagagaaaatcagaggtctcaaggagatgaaggcagttactgatgaccatgtgtaacagggaaggaaagcagaggccagggtagcaactggaggcaggtgcctgatgctgagtggatgataaatcaatgctcacaaaactgctggctgagggaacagttgagggagccaagtgcctggggttaagtgatttggatgatggtcacattgttgagtctgtatttctttaaggctttctgataagagtgggagaaaagcctgaggattgtgctgtctgcagccagtaacagaacagagctgagggctgaaagtgtgggggtaaaattcctttcacctgttcccatctgcagcttcaaaactgcccagttttctgtatatgccctccatttgtgtgagatctggaataaggggaacatcagagaaaatccaggaatgctggttgggggtggaaatttatcatccaggacttggagatggatatggttgagaattgagtatttattttccaacttgtctgcagactggaggacaaacagcctgttccttgtgttcccttttgggatctagacttctgcttccttggtactattggctacagaaatagcctgaaattaacagggataggatgacaggtaagctactggtcatttattatggatcagaattttttttaatctcaatggatataataatcatttggttatcttgcaaaaaaaatgaaagaaaaagaaaactaaaaacagattcacctcaccagtccctgtgtggttatctgtctcacccaggaggctgctgattagatgatgaatttatgaaagggaaagctatatcaaatctgactctgtgcccacacccactatggtaacacgtggtgtgtccacaagaaattctcagtcagttcatctttccctgttccctttccctagcatagaaacatgcaaagaaaatacataatcacagatgcttaaaaacatgtgttttgggctggaggaatggttcagtggttaagagtaattttggctcttccaaaggacccaaattcagttcccagtaccccacattgggtggttcacaaccttctgaaccaactccaggcaactcaatacactcttctgatctccatgggcaccctgtacatatgaagcatacccacagacaaacacacatacatacaaataaacaaaacaaaatctaaaggagtgcatttacagcttacagatattttccccacaattgtttggaaacgtagaagccttagttccttttttattttgtttatttttctattttgaccttcacagtttggcacaaccccacttttgttgatttggcattccctctgcggatcatctttcttctggctttggaaaaagcttccatcttttaccaggcacttttaacctgcaggatctccatttagcttaattggcatatttatgtattgagatgggtgcctagagggcttgggccacagcatcttttgtataaatcgaaaaaaatgaaatgagctgttctcacagtggtgcgcccttcagtcatggagagcgctaaaaggctcatcatttacaggctgcgaaagctcagggagatcaataggtataatgcagcccagggccatttagaaaagcaaaactggggcattttcaagcccaattactttaggagcttggccattactaattccccattaaatccttcctaggcctccacttgggtgttaaggaatggcctcaacacagaagcagcagcctccgaaggctaagccaggagccctttcctgagagttggacaatgtgagctctggggagctggcactcctggccagcctcctctgatcacaagctctgctatggactgtcatttttcaggtcgcttctgaggcccagcttgctttgaaggcaagtgtgggaattgattcttattagtttaatatagctatagttaatggcttatagatttttatatactctggcccagctcggcatgtctattaagtctctattaaggttgacagaagacagagcgggtcataggacttgagacaaatgcatggcttccctgcaagccagactgagaaatggctccttaacaagagctctgagaacctcctaaagatgtgagagagaggaaagggaactgagcttgtgaggatagtatcaggctagcacaatgccctgctgggatgaactgaaaacagaggaccatctgccctcaggagtttctgctcctacccaaatggtgatgcgtggcaataaagagtccacctagaaactgtcaagaacctacttggaaaaaggatctttgaagatgcaattaaagatctccaaatgagagcatcttggattaactccattggaatcgatagagcaacagataattttataagaagaaaagatgcagacacagatggggcaacgtgtgaacagagcaggggtcagggatggggcagcacacctgtgaacaaagaaactccaatgattaccagcaaagaccagaaattgggaacgaagtgtgagatgaggtccccctgtaaagtaaatgtccaatttgttttttctcctcacctgatctaagaattgtgatcctgagaattgtgagagaatacatttctgtcttgctacattatctaatttcaaacaatgttttggcagcagtcttaagaatctagtactctggttactgctcaacgctggagaaactcatgagccaaggggagatatgagccctggacagtagatcaaaatgtccgggtgggtgctgcccctttgggaatggcaggcaaccttgggaaacagtgaaaagttggaggaaggctggttaaagtcagcacacacacacacacattccctccaggctgttcagggcaatcactaactgactctactgcaccatttcctgcactttcctagacattccctgtgggtgtccacagggcaacacagggcacagactccagtgtcttgcagggtaatagtgaatgaagagaggcacagaatgaatggaatccacctcccttcaatccccaaaccattgctaatgacccaagggaatggctccctccccagcaactttttgcaaggactttcaaggggtgacactgagagagttacctgacaagatggcaacaaatgacaaagagcagcaatggttctgtgactaccaagagctccttcctgggactcactcctcccattctccaactcacctgaactcacacacatgaactcatctaaatcaggactctgggaacaagaatttaaagtgaataaaacaaatgcctatggtaagggaccatattaggtttctgaaccaagaacaaaagtaaagcataactaaatgaaaagtacaaataagtctgtcctagtttgcttttctgttgctgtgataaacgccatgaccaaaagctacttggagaagaaaggggttaattttaactgacaggtacagtccattaccaagagaagccagagcaggaaggcaagaaatgaagcaagagatcatggaggagcaccacttcctggcttcaccctcctgacttgctcagctccgtttcctacacagcccgggcttacctacccacatatggtattggccacagtgggcaggccctcccatatcagtcagtagtcaagaacatgccccacaggcgtgttgcacaggccaagctgatagatctgattgttcagttgaggttccctcctcccaggtgtgtctaggtttgtgtcaagtagccaggaactaactatagtaggtagaattgtggtgatatcttgctgtacaaataaagcctgtctgaaggacagagaatggagcttgccactagctaagcatagaggtctagaggtctgcacagagctagctggttagaaacaggatataagtagggagaaacaggaactcgctctcttgtctgctgggatgctaaggaggtaaggtgtggcagtggcttgctccttgtctctgatctcccagcatttccttctatatctgactccagttttttattatctacaccaattaagaactccatttacatggaataaatagtagaatcagtgtatcgaaataataaaacactgagttggaagatcagtttgtagtaaccatgacaggcaataaactgatctcttttatgcacaatgaatctatacaaatttttaatctaaaatttcaatttatatttgtttgggggtttgtttgttcatttatttgtttatctgtttttttttgaggcaagatcttgctagactaggtttgtctcaacttgcaattcccttcccctagtctcccaagtgcttggattaccattgtacatcaccatacccaatgacaattattaaatgtgctgaaaatataagaaaaactcccagaagttaaaaacaatgtgaaaaacccaactctctgataataaaatgaatgtataaaatataataataaaataacattttaatccttgtgtggagaaagtacaaagctcttcagatacaaagtgatcaaatttggatgaccttgacaattgtttaaatacataaatcacttcagagttacaggttttattggttattaggtggggttttttgtttgtttgtttgttgtttttgtttgtttgtttgtttgtttttatgattcctgaaactagagcttgatagaaaacagaacagaaggcatgagggcactgggtatatggaggtgaggccaaatactgccaaataaggttagtgagacagggatgctcacacactgctgggttgcaacctctctggagaccaatttaaagatactaattcagttcagaaatctgtggacatgtgtgtggaaattcccaacctctgctctttaaagggaattccttttcctcttctctcacattgcccacagaggcagtctctccatcctccccagcattttctataatctgttcacttggtccaggatttactaaacatcaaaaagagcagttgccattacatgatgtctgatggtcatggtgatcattgtaccagccttgtattgcttgcttctggaattttttgttgttgtttcaaatgacatttctttcatttgttcaagccacccagatcatttctcaggtgtgtcatgttaccaaaagctaaatgctcttcaaagctgaaagatttaataaaggttgggcacactcgccctaatttgatcaggcattcagtcatcatttgggtgagtctgaaatacttcaaaatgctcttcaatcaccaagtgttgattttctggctatattccccccaaatctgttttgtttgagttctagaaggtgtctggtgatgtacagattggtcatatccaactagagtgagaaaccctgggctttaggagtaaaaatgaaaagacagtctatgacatatgtactctccagtttttaaatgtagccttcaaccttatgtgaaggaattggtgaaagatgggccaggccaacttcagtggctgaacacctagcttgcctacattgatgccatcaggcaaggcaactctcaaataaggtcagtgtggtacactggaatcaactccaagaagaatcctgctgcttcatggtcatcttgagccataatctgggtttcctccctgggtatgttggatgctttatttagaaccttgttaagaaagggctagaagaaaatgtcccaaggaagagcaaaatcaatgctgcagctcacaatggaggtccaaggaatttagaaaagcctgaaactctaaccagaaagaagcagctccaaaattcacagccgttcacattggctatcattaggacactgccaatgtatgcttttatccgaatactctctttgttgaccatcctcacccccaccttcttcttgcctggatcttttaaaaaatacatttttgttaattctttgagatgttatacaacattttgatcacactcccctcttccccagctcctcccatactcacctctccatcctctcttcttacccacccaactttgagttttcttctcccaccctagcccactgagtctagtttgtgttgcccaactagtcctgggaatgggtcctgccctggagagtggtcaacttagaaggggtcacatcattaaaagaaactgactctcccttctccctctcctagaagctagccattgccaatagctcctcagccagttttaggatttcatgcctgctttcccctctccatgatgggattttgtctggcttcaccttgggctagtcttgtgcacgtgatgacaatcactttgaattcatatgtgcaaataccctgttgtgtctgaaaaatactctttcattgatgttatccaccatcttttgctcttaaaatctttctgccccctcttctatgaatattcataagtcttgggggtgtcatatgtatatcccatttcagaatgtgcattccacggtctcttattctctgaacattgaactgttgtaagttaattgcctatgttaatccccatctattgcaggaagaatcttttctggtgagagttgagaggtgcactgatgtatacatctgtaagtcactaggattccttttagtactacatccatctagcagagtaatagcaccgtgctctcccctagcacctatgatctgtctagccacaggttgttgcctactttaactgtgctagctatgggatttaagaagctctgggatctgttcaaaaagtgcttggctactccaataatattcataccgctattgcaccagttggtatatcttgtcagggcagttattgttgtaacctgcagagttcatacctaagtgagactgatggttactttttcccttctggtagtaggcataccgctctacagcgccatgaaaactagccaatagagatgaagtttccaggtgagtaccagcttgcttcctccatattctgtgactcaagtatttggttccttcaacaatagggtcttagagtcaaattcatgagtgaaagccaagtattggtaatagcctataatgtttggggggtctatggagtcttattttgattggaatttttacaggggttcattaacataatttatagttaagctgtatcagctggcctggtgggatttcttgtgtttaaaagattctattcttgacttttaagacattgtttgagaaaatagcatgtttaatctccaaactcatttatccatcaagatttccatggggatgctcaatctttcaggttgacacaaggtagggaagattccccccccccaaaaaaaaacctaccccattttccttaatgctgaattttgtcactattgaggttactggtatgtaaggaaatgtagatgaacattacagaaatattagaaagagtgaggaaggacatggcagctgtcaaccaagagactgacatggtgtagcagggacagaggcacatggcactctaccggtttatattatcttgttcaaattagcacaaagtgtagagtttgtttgaacgactcattgggcttgtttgtaaatgggacactaagacattaaggatcgttattctctattctcttttccactctattaaatatgcatattgtaaaaagcctttttttcctgaagaaaattcaagatttttttaattcaaatcttctgagactgaaagaaaggagcaagaattacataagcagcctgtttctaccaagtagatttttatgaaaagactcccaacacacaatgagtcggggggggggggaagaaaggagactatgccgcgccatgttttcatttctgctgaagctaagagcaaagaccagccctggctctactggagagcaaggtagctcaatgtgctgtaccacacacagcacaccaacattcgctctgcagtggtagatttggagataggaggtatttgagtaaggataggaaagtggatcgatggttccaagtagtacacgccagtgtaagttcacacatcagtgatcacttagtacacggctgaggagtaaacgcaaaggcatggggcaaggaccgtctttttaaatatgttgtgtctgacaatctcatcttgaagtgaacaaatgaaggaatacgttggtgtgttcatccgctcctttattggaatcattcatacacacataaaacagatgacttatacttcagcagaaaacataaacaaaaccatgttcaaagaccttagatgggatgaggtgacaggccagttggtcaagtgcttgtcacagaaccattggatctgaatcagttcccgtaatgcacatgagaaagatgactgcagtagcgcctgcttataatcctagtgctggggggagaggagacacgtggttctgcctgagcctagcctgtgagctccagaccacgtgagagccacagcctcagaaagcaatgtagagtcagtccaaagaccacatcaaggcctccacgggcacacgtgcgctcacatacacagagaaaggggaagaaagggaaagggagagagaaaggaagaattagagagtgaaagggagaggaagagggagagggtaagacttaacaaagcctcagtgagcacgagttcccactacccatggtggacactggctaaactttaaaagttagacaaagtcaaatgtcaacaacaacatggtagagtagaaagtcagtgaattggtggggcataaatgtgtgtatatagttggaaaacaatgtgtctctatctagcacaacttcagctatgtactcctgaatctagcaatcttgccactagatatactctccagaaaatattagcataggggcctatcagaagacaagcaagagaatcaactgaacagtacactcagtgtagccaaaaagacaaaaacaaaaaaacagaaaaattaaagaaaaattgataaataggttatggaaattttacttaatgacatcctatgcaggaaaaaaatcagcaaacaatagctgccaacaacaatattggtgcttctagtgttcaacaaaggaaggtagacacaatattccttaggatttcatttttataaagatggaagttgtaaaacagacaaaaaaaaaaaaaaaacagttggactggtgctatagctcaacggcaaagtatttgtttagtgctcagaagtttctgagttcaattccacactccaaatggcaaagcctaaggtatagtgctgaggacacacatttgtgtgtaaaggtgaagggaaaggggaaggcagtgatcgtaagaagacagagggaagaatgtgggctgtacggctcagggccatttgagactccgaggatgttgcacttcttggcatggatgctagacatttcccaggtcactttgcactgttaactgcattaagatgtataaatccaggtatggcagctcgtacctgtcaactcagcactcaggaggctgaggcaggaaggtttctgctattagcccaagtctagcctgatccacatagtaagttctaggccagcctgggctaccgtgtgaggcacccctcccaaatcaaacacacacacacacacgcacacgcacacgcacacacacaccacaaaaatgtaagtgtatatttaatataaacattaaaaaatccaatcatgacatacctgaggcaacttgctaaacgaccgctttgctgtctatgcttgggaagtgaactttctgggaggtcctgagatagcttcccaatcaatggtaaaaggtgttgatatgtcaggccagtccagtacacagcagataaaagaaaaggcagggactctgctgatttggggctgtagttgcttgctgctgccccctgctggcttcaatgtcctgggaagcccatttcaggagtcctatcagggactgttcagtgatcccccacatatgagcccccaggaagctgtgccctaggtgtgcagatgacgggacatgaaaataaaatgatcggcatcctgtgcatgatgataaaacagatgctttaggaaaaatattttaaaggacttttatttgtgctaagggaagtgacttgttctatcaatcttgttccataaaataaccccgtgtaactcacccacggtgtttctatgttcatggtatcgatgagaagcaatagtgaacaaaagacagaaagtttcaaattcaagaattgccggcactcctatcccagtccagtctgttcatccctttagccagtgttagctgaacattattacaaacccaaggctgtgctaagcattgcagagactggcccttatgaagcaagcatgttattggggacacagacaataataaggtaaatactcaattttagccaagaagaaagtaaagcagggtaggagataggaattatgggaaggcctagaggtgaaggggttgttttgagaagaatggtgtagggtttcaaaagccattgctttttctctaactactgaaattaactggcttacagcagctgttgcatccttcctgggactgagtgaattaaccttgactttgggtgaagcaatgaagaaggagcagagaagcccataggaagcagctcacactgagctagagtattggtttgtcaaataacggatggaaggaaggaaggaagggacggagggagggacggagggacggagggagggagggacggagggagggagaattaatgttggctcatggtttgaagttgtaggccatcatagaaagttatgcaggggcttcaggcaactggtcacatcgcatccacagtcaggaggcagagggagatgaatgctggcatttgactaattttctctgtttaagtttaggactccaagccatcgaataatgccatccacacatggaataggtcttgccatatcaatgaccttgttctagaaaattccccacagatatgcccagaggtttgtcttctaggcgattctagatcctgacactattaaccatcacagctggcaaagaataaagggaagggctgaggtgacacagatatcctagtgctccactgacaagggaagaaggggaggggagggaggactgacaaggaggatcaggggaggataccacaaaaagaagggtgtgccaaagccctgaaaccaattccttccctcttcaagttgggtgaggcctctataacgtgtttgaacatggtcccctccctgcccccagttgacaaaacctatgacaggcagacaaaattacaacagaatcactctgatgtctccactggcatttaatcatgaatccagcaaccctcagaaccagcacagggtccgagaactccagcctgacctcatcctttgccttcttagatagagtttaaatagttggttgcctgctctggctgaagcaccgctaccatgagccccaactgccagagggaaaactgcccaagctgtcagcttttgtgctgtagttgtcatgtaaggactcacaacagacaccctcagcaacctccactttaactcattttggaagtattgattgctaatgattgctaagctggggtctcccaatattgactggcttgacagacagactgaagagatccatgaactaactgaacaaaaagtcgtgtgtgtgtgtgtgtgtgtgtgtgtgtgtgtgtgtgtgtgtgtgtgtgaagggaaaagacgaatctttgttttcactgatctctaactaaaatgaagattgtgtaactcggtaataagtggcaaacatcccaggacaattgtaaataccttgaaatatcctctaacccacatttgttccacaatcacaatgggtaagaggtttgccccaggcttttatctcaccacgttttattaaatattcaccacatttcaacattgactgatttgggtttgtttgtttgtttgttttcataatccagcgtgtaccattctatatatttttaaaggcactgtgctgaggtgttcaaaggcctaagggaagccccctgttgcaaatctaggacttgtttgggaagaaccgacctttccaggcatcccaggcatctcggaagatttgtccgagaacaatcagaaccacctcagggtgacaggttcaccccagctccaggggtctaggcacctggctgtagaagagacgagaataataacctgataatggggattatttcccccggggttacagggccatcagacatttctagggacatactgccatctggtgaccaatttcctcccttatttctgactgtcctgtaatcgggagtattcacagcaaattggcagctctgtgagggctcagtgctcttctccaatctgtcctgtctcaggtctcagtcccattcatgctcaaccctcactctgcagaaacacattctgatctccaaattataaatgttcagtaggcagcagtgactggcaggattcctaaggcttcaatattaatgggagtccctcatcctgcaaaagacagggtcctatgtagcccaaaatgaccttatactcctcccgtctgcctacctctgcttcctaagtaacagacttgcaagtgtatgccaacaacgcccaacgctcatatctggatagattttcagatagtgttcagagagactgtgggcctccagggagcacacattttttgacatgttgaagcttcagtggtcccggagtctcaggccagggtagtctcccacccttggtcaacttgtcttggctcaaacactgtggttgtgatgccttgggctcttctacaccccacccctcttccccactcttcagatttccaacactccctgccaggctccaagccaccacttttctttcccctttgagttttttaaatagtctcttgtcctcttgtctcctttctcccacctttgcccccaaggcttccttctctgtgtgacatccagaatgattcgatgaaagcatacgcctggccatagcttcctggactcgatacccctcagtataaaagacgtcctcaatctataagactgctgccatctgccctacaagagagtctctaaactcctagacttctacacagctgaataatgaggtaaggaggggtgggtattcttgttatccttcaagcaagtgatctatgcctgtgcctcagggcatttgcaacagctgtccccctctgccccaaacagcaaataccaacagggttcattctctcagttctttccaggccctattccagggactctattctgcctcttcctgatttgattttctctgtatctttatcttcatctaacgttttctgtatttctttaattttttgttggctccctatcactgccaaagcaatcttcatgagaaggtagatagttgtctccagtttagtgttcagttcccagtgtctagagcagtgctagtcataggacagaacatggaatgtctacagttgtaagactcctatgactttcagtcaggacaccaccctgcacttgtcagtagccctgcagcaagatcaacccttccctggctgctccaggatccaagaaaagcatcatcctgggtcattgaaggagtaacaatatgcaaaatgacaattttttttggttttgttaagtttggcttattttgttgttgttgttgttgttgttgttgttgttgttgttgttgttttgctttgttttgatgaggtctttccaaatagcccgaactggcctggaattctacatgtagaccaggctggtgtatggttctatatatagaccaggctgatgtggaattgcatatgtagaccaggctggcctagaacttgctgctatcttcctgtcttttagcctcttggatgctgggattacaggtagacaggcacacacacccagtctatatagtatttgcactttattttctccctggggactttttaacaattatttgcttttaaaggtttttaaatattagctgatacataaagatggtaaatatttacagagttcaaggtgacatttcaatgcataggtatagtgagtaatgatcagaccagggtattcaggacatctatctcctcaaatatacattgtctgtctgtcatccaaaatcatcctgctggcttggaacataattccttctttgattgtacccccatattattgatcattctttcttcaattccttcctgtctcccttctcagcttctgggaaccactattgtggttctgtgagatcaactttttaacttccaactataaatgagagcatatggtctttgtccttctaactctggtgtggtagtttgaatctaatcggaccccataagctcaagggagtggcactactaggaggggtgatttattgagtgggtgtggccttgttggaggaagtgtgtcactgtgggggtaggtcttgaggtttcctatgctaaggatcccacccagtgcctcaggtccaattcctgttgcctgtaagatgtaggactctcagctactactccagcaccacaactgcctgcatgatgacatgatggctgcctgtcatgatgatataatggagtgaacctctgaaactgtaagagagctccctcaattaaatattttcctcataagagttgcagtgatcatggtgtctcttcacagcaatagaacccctttaaaaagttgataccagggactggagtgttgctgtgataggcctgaccatgtttttgtttggagtaatatggtctttgggggtttgggttaagaaagtagtggcatgctttaagtgttgttcaatgtgccatactagtaggagcatgaagacagtggtgctgaatgtgatttaatgaactatagggattaagatgtttcagaggagaagaatgttagtatgtggcctagagactggttatgtaatattttggtgagagaaattgctgcttcttgcccttgtctgaggagtctgcctgagaataaaatgaagagttttggaacttttgtatttgcagaaaaaaaaaatctccaaacagcctagtatagattctgtcctatggctattagtggtaactctaacaaagatttataatgaaaaggtgtaagcaggggaaattacaaaatgtaaagtctgaggagaaaaagaataccattaagtggaatggaactaagtcctgtgtttcaggagataaacagattaagaaatagaataaaggaagtggtgacctcagggaaagatcccacccagcttagcgctgggtatgatgaggcacaccttttaatcccaccactgggaaggcagaggctgacagatctctgaatctgaggccagccgggtagagagatccagtttcaggacatccaagcttaggcagtgaaggacagaaagctagtgaagatgtaactgaatgaatggaccatgtttcaatccttccttctaagcagcagaacttggcatctttggccatgtagttctggctttagagttaaggatagaagaaacaggttatagcatttgcctctacatctaaagaaagccactagggccaggcatgtgccaggggtgtctcagaatggaggcctataaaggccatttcatgaagctataaagttgaagcttgtattgccttggaaacttcaagatgctaaagataccagagtcatgatacctgcagagaaaggctgctaacagggtatggaaccagcccaagagaaacaggttgttgcagtcaacaaagctgaatggagttggagatctgaagagtgttaaggcatcagacatggagatgcagagtttggagtttgttcagttggttttgaaatggtaatgtacatcctggcccccataagcctgtcacaatatcataacgcaaaatgcatttagtctaacttcaaaagtcccaatagtctattacagtctcagcaatgttttaaagcccaaagttcaaaatctcttctgaggtttatgtaatctcttaactgtcaaaaatcaaaatcaaaaagtagatcacatatatatcagaagagactttgaggtttcctatgctcaggatcctacccagtgtctgaggtccacatcctgttgcctgaaagtcataaggagtgtcagctactactccaatatcacttctgcctgcacacagccatgttccccaccataatgataatggactgaacctctgaaactgtaagcaagccactctgattaagtgtttttttttataagagttgctgtggtcatggtgtctcttcacagctacaaaaaccctaattaagacatctgacttattttacttaacatgatatcttccaggtctagctatgctactgcaagtgacagaatttcattctttgtggttgaataatattccgttgtttctctatcacattttcattgaacattatggatcagtggacagcagtttattccatatcttggctttattaattactattaacatagggatacacgtgtctctttaacacactgattatatttttttcatatatacctagtttcaggataacaggataatatggcaattctactttgttgaagaacatgcaatattgttttccatgatgactttacaaatttgcaatcctaccagtagtgtatgagagttcccttttctctatatggatgccagcatttgttttgttttctttaaaatttattttattctgtaattactactcatatttacatatcctcaccctcccatcttcccatgttccccacccccgcaacccatcccccaactcctccccaggatagtgaagccctccataggggaccttcaaagtccatcatatcatttaggggaaggccaaggccctccttgctgtatctgggctgcagcagtaaccctccatagggaatgggctcccaaagtgcatttgtgcctcctggctggcacccacattcagagggcttggctcagtccaatgctggttccccagctttatgactagggtctccatactctcactaggtcaggtcaactgtttctgtgggtttctccagccccgtcttggctcctttgctcatccctcctccctctccacaactggattccaggagtatggttcagtgcttagctgtgggtgcctatttctgcttcgatcaagctactggatgaaggctctaggaatggtaaccaaggtagacatcaatctcattataggggaagggcatcaatggcatattctccaccactcctggattcttagttggggtcatccctgtggattccttaacgtattccctgtgccagacctctctccaaacatgtatggtctccctctatcaagacatctcctttcttgccctcctctattcctcccctgtctcggttctcttgttctcctccccttccctttctacccttcccacctcctttctaccccaccccgtgctcccattttgctcaggagttcttgtcctcctccccttcttggagggactatgcaatcttctcctgggatcctccttgtttcctagttcctctggcagtgtagactgtagactggcaatcctttgctccatgtctaaaaatcatatatgagtgaatacataccatgtttatctttttgtaactgggttacctcactcgggatggtttcttctagttccatccatttgcctgtgaatttcaagattccattgttttttgtccctcccgccccccgagtagtactccattgtgcaaacgtaccacattttctctatccattcttcagttgaggggcatctaggttgcttccaggttctggctattacaaataatgctgctatgaacatagttgaacagatgtccttactgtatgaatgtgcattctttgggtatatgcccaagaaaggaattgctgcatcttgagttagactgattcccattttcctgagaaaataccatactgatttccaaagtggctgtacaagtttgcactcccactggcaatggaggagtgttcctctttctccacatcctctccagaatagactgtcattggtgttagtgattttagccattctgacaggagtaagatggtatctcagagtggtttgatgttggctattggtttgctgtatattgcttctatcatgtttaggtatgttcctgttattcttgatctctccaagacctttatcatgaagggatgttggattttgtcaaagactttttcagcatctagtgagatgatcatgtggtttttctttttcagtttgtttatatggtggattacattgatggattttcatatgttgaaccatccctgaattcctgggatgaagccaaacttgatcatggtggatgatttctctgatgtgtgcttggattcgatttgccagtattttgttgaatatttttgcatcgatgttcatgagggatattgatccgtagttctcttttttagttgtgtctttgtgtgtcttgggtaccaaggtaattgtagtctcataaaacgagtttggcaatgtccctcctgctactattgtgtggaacaatttgaggagtactggtattagctcttctttgaatttctggtagaattctgcactaaaaccatctggccctgggcttttttttggttgggagacttttgatgactgcttctatttcattaggggttataggtctgtttaacttgcttatctgttcttgatttaattttggtaagtgatatctatccagaaaaatgtacatttcctttagattttcaaattttgtggagtacaggttttcaaagtatgacctgatgattctctggatttcctcagtgtctgttgttatatcccccctttcatttctgattttgttaattagcatgctctctctctctgccttttggttagtttggataaaggtttgtctatcttgttgactttctcaaagaaccaattctttgtttcatcgagtctttgtaatgttttccaaatttctattttattgatttcagccctaagtttgattatttcctggcaaatactcctccagagtgtgttggcttctttgtgttctagagctttcagttgtgctattaattctctaatgtgactattctccagtttcttcatgtgggcacttagtgctatgaactttcctcttagcactgctttcaaagtgcctcataagtttgagtatgttgtgtcttcattctcattaaattctaggaagtctttaatttctttttttatttcttccttgactcaggaatgatgaaattgtgcattattcagtttccatgagtttgtagggtttctacaattggtgttgttgttgaattcaaactttaaagcatggtggtctgataagatagagggggttattccaattttttgtatctgtgtatgtttgctatgttgccaagtatgtggtcaattttagagaagattccatgtggcactgagaagaaggtatattcttttctatttgaatggaatgttctatagatttctgttaaagccaattgggtcataacttctgttagttcttttgtgtctttgttaagtttctgtctggtgttcctatctagtgctgagagcagggtgttgaagtctcctactataagtgtatgaggttttatgtgtgatttgagctttagtaatgtttcttttacaaatgtgggtacctttgtatttggggcatagatgttcaggattgagacttcatcttgatggacttttcctctgatggtataaaatgcccttcttcatctcttttgattgattttagtttgaagtctaatttgttagatattagggttgctacaccagtttgtttcttgggtccatttgattggaaagtcttttcccaaccctttactctgaggaaacgcctgtctttgacattgagatgtgtttcttgtatgcagcagaaggatggattctgtctttgtatccattctgttagcctatatctttttataggcaagttaagaccattgacattgagggatattaatggtcattgatttttgattcttgtttgttttggatttgttggtggtggtgttattatgtgtggatttctctcctttttttcttgtggtgtttggtaaagagggattatttattgcctatggttttttgagcatagtagtcttcattaggttggagttttccttccagtaatttctgtagggctggatttgtggaatctattgcttaaatctggttttgtcatggaatatcttgttttctccatctatagtgattgaaagctttgctggatatagtgatctggtctggcatccatgttccttagtgtttgtagaacacctttccaggaccttctggatttcaaagtttccattgagaaattgggtgtaattcggataggtctgcctttatatgttaattggcctttttcttttgtcactcttaatttttttttattctgtaagtttggtgttttgaatattatgtgttgatgggacttctttttgtggtccaatctatttggtgttctgtaagcttcatgtactttcataggcatatccttctttaggttggggaagttttcttctatgattttgttgaatatgttttctgtacctttgagcggaatttcttcacttcttctatacctattattcttaggtttggtcttttcacagtgtcccatatttcctggatattttgtgttagggatttgttggacttgagattttctttggtcgatgactgtatatcctctagtgattcttcaacacctgagattctctcttccatctcttccatctttattctatttgttatacctatatcagtggctcctgatcacttacaaagatttccagcatcccctcattctgtgttttccttattgtttctaattctgctttcaaaccataaactgtttgaattgtttccttcacttgtttggttgtttttcttgacttttctttagattctttaagagatttgtttatttcttgaatattttggtttgtcttttcctccatttcatgtaattttttgcttgttttttcttctatttctttaagggattttcttgtttcctctttaatggtccctatcatcttcataagataatttttaaggtccatctcttcttcatcctctgcttttggcttttcagatcttgctggtgtggagtccctagattctgatggtgtcatattggtcttgctgttgttgagtgtgttcttattctgtcctcttcccatcccttcttccagtgggtgcaggtggggtctctccctgtcttctagtctcctcaagcaaagggtggatggcagagggggaaccaagtgtgaggtgtatctggactcagggtgggccttcaggtctgggtgggtccactctactcgaggggcaggctcaggaagaagcaaggaggatgtggagggggaaattgggggcagagcagtgtccagactcaggcagtgggcagagggcagagagtggaggggggacaagagtgaggtctggccagactcagggtgggccttcttgtctgggcaggtcaattcttgtctaggggcaggctcaggaaatagggaggagggggtgatgggggaagttgggagcagagcagcgcccagactcacctcaggcagcaggcagagggcagagggcagagaacaccttgttttactttttatatattttaattaaaacaaaatcacatcaagtaccctcaagtccccttccttccaccttttcaatgcctcccactctaaagtcgatagcctctttctgccctattattattattgttgttgtttgttgttaaatgtttgtgcacatacacataaatacataaataccacctgctgagtccatttttgttgtttgtgtgtatacggcttcagggctgattattctgcattggacaagcaactaggggtccttatctctagaggaagttctctctctccctctccctatttctcaccctccctccttcccccttcctctccctctccttccctctctctttctctctctctatcaggaaccatcggttgcctgtagttcctttgagattttcctgtctgtgttagcatgtctattaatattgtcattgttctggtcttgttatacagccatttctatgagaaactgtttaacagcagggggcatcatgtcccattgtggatttgattggcatttctttgaccattagtactagtgaggcttttccatgtgtttgttgcttatttgaatatcttctcttgagaaatatctacttagctcatttgcctaccacttaattgaatgatttttattatttactatatggctagtgagttactcgtatatgctggatatcaatatgttgttggattctaaattggaaatactttcacccattctgtaagctttcttttcactctgttgactggttcctttttcagagatgctttttagacagaatctcctccatccattttcattttgtcatgagtgctatagagtcataaaaaaaaagccttagccaagaacaatgtcctggtatttaccctctcatagttttgggtcttgcatttaagtttttgtccattttgagtttactttgttccttagggatggatatttaaaaaaacatgtagactcaccaggtgtgacatcacacacctttaaccccagcaatcaggaagccgaggcaggcagatctctgagaattggaggccagcctgatctacgtggtgatttccaggttatccaggaccacatagtgagacccccgtctcaaaataattacaacaaatgtgaagaccatcccccacccagggtgaacttctgacatagcctgagatgggggcctaagcatctgacagttttaagttactacatgactatggggcacagccagggctgagagacactagttcagaaactgacagttaccaaagcacttctgtgttgtgtttgcttctcacacttccccacacaagatgggacagcaggtttctgtccccatcttacgggagccctgagaggatgactgacctggccatccagtaaatctcagagttggaacttcaatctgttttctgactcaaatcccaggctctttctcacccaagtatagcagaagccatctgtaaataatgctgtatagtcatgcataaccaactccacttcttcatatttagattgcatttctttttctgtcttgcctcagcagatcactaagcagcaaaacttgggaacagaccccaagctgcattattcactcaggacctagcatattctggtctctgcacaagttattttttgaatgaatgaataaatgaatgaagccattgttcccactgttctctggaaactcttgtcctgctttaatggctgtactgtctgttggcagctacactcaaatgttggtaattagggctggtgagatggcttagtggattaaagatgcttactgtcatggtatttgtgtgtgtgtgtgtgtgtgtgtgtgtgtgtgtgtgtgtatttgtgcacacattcacatgtacacacacacaattaaaaagtaattttttaaaaggagagtggtagtttaacactaagaacaattgagctcatacctgggactgaggtgctgatctcctctcctttcccctgaacagttttgtacctggaaatgtcaccgagtgttgggataaaaaaaaaggaagtaaagttctttctgcttagaagtctccaaacttcaggctgtcataaatagtctcattagaataacttgctttcccagcaagcctgcaaatctaagtagacagaggagggaggaataatcttgcattaagttaaactaagcatttagttaaaattaaagttattttctctccagatgaacttaatgactttcctgaactggaaatgcctggttcccatcagccaacaggtactctctagtttctttctctagtttaagactgcaggttgtgcaccagatttttttcaaccatggcaacatcagtgtttaggtttgtcgcattttttctatgggtgggacttgtcttgtgcactgtaggaatttagaggtgtccttaatctccaccaagacccaccaacagtttagtcaatgctttctcaaagtctgtccccagaactctccacaaccctgtctgaggccctcacttaacctatttcttcctttgtcttccatgggatattcccaatataacctctctgccaatttttccacttattgcaacacatgggctaacacaataggtatcaaaagtagttctagaacactggcagtaggatggagttctgagagtgacccattcactatcacttagcaaggaggaccacaatccagactgaatatggcatacacatggttcaaagtgcaatgtggctgctgagttgttaagcaagtcactatcagtgggctagagcatctggtggaaatactcttgccaatgcagtcagttgtttgggcatttgaaagttttcaatgatgcattttgaccacatactgtaatacctgaccacctaagagaagtgtttgtattggttcctaatttttggcgatgcagtccatgtggtagctaaccttggttgccagttatactacactcatttctagttttgtaccaaggctatgttagctcgcccaccctctgtcttaatatggtccaaagagatctgggccatctggacaccacactgaaggtcacatcaaaccattacatcaataaaacaaaggtatgactggaatgctagagacattgattggaaacatgtgtcccatggggcatgcagcaaaccctgcaaagatttcaggatgggccacttcaataacatttctaggaatcatatgagaatcgacaggaagtagtaacatttttgcatgccagcacacgtccacaaaggaagtcactgaacaatcgcttcagccagttgtcactagtcagtcttcaacagtgggttaggggtgtgtaaatggagtgattacagtggcagagatggggatccacctataggtccacaccataaatattcactcaaccaagaccaatctaactgctacttccagcgattaaaaaccagtacaggacacttaatatggcattgtttcccaaagaaaccagtagaccacttggtgactagttgatgatattaggctctacttattccgaagggactacaggttccttctcataggtgcaaagtcctatttcaagtatgggtttccctgtttcccattgatagagcctctaacatcagtaacatcagaatctatcagcctatgaagtaccttgtccttgggtgcaaaattctacatagcataaccaccacacaggagatgtacatcagagcaaagcaggggcagggtggacccatggcttgagatccataagctctatcacacactgtaccacctagagattggcaaacggactggacagcataaatataattcttgcttgataattgttctgattgtatagggagtttgctgtattagagttaaaccttcctttttatttgaacaaataaagggttattgtgggctattttttatcaaactctgacacatccgagactgccaataaagtttgctttgaatcagagggcaaagctagctactagctgactaaaattacccatagaggttttagaagaccaagggcatatatatcaatataggaagtaatagggtgggcttagaaagattcttggcctttttggaatgagaaggagagagatgaggccactggtcacttctgcaccacttctctgatcattcaggctcttaacctgatatctgactccagggtttttattgataaagaataattagataaatgcttcaagggtgcttctataaatagacacaaggagaagatgaagagctcaggagacccacttagatgactttcagggttctttagccccctgttaaaattgtgcacatgtgcctttaatgtacacaaagctttagaaaaatgtggttacaaatagcactaatgactaaggccaccatcagaatcttgttactagagaagggtaagatgagttccaatgggaagtagaaaggaaacccttgagcccctgtcgcagccatgatgacagtttgtcccacagatttctttcttctaacttttctttggaaggacagagttataaggatattggaggagctacctccccagaatatggagatagactgcatgaaggctggattctttttgtagcatcattgctttattaatgcttaaaatattccattgtatggatatacctccattttacatatctactcatcaagtaatgaacatttgggttgtcttgatttaccagctgctatgaataatactatgaacattttacacaaatgatttatacatgcatgtttaggaatatatgtttttatttctgttgacgaagtacctataagaaaaatgctgaattatgcacctggcaatatagatttcattttagggaatatgggttgtttttcaaagtggctataccatatggcaattttgccaacatttttgttcttatctgtgatttttggtattatcataacaaatgtggctttgtttctctcctgaaacatagtttttttatgaaatagaaagtagtttttattttgttactttcttgagaaatgaggtactaggagatactcaacatgagtagctttattattcctttgaaggctggattctggtcaccacaggagtaaactgttccaaactcttctcaaggaagagcctatgatgagagttgccatgacttctggagccatcccagtatgaatgctacagttatgttcttcctagctcctgttagtaatggctgagtgcagaaccacacaagagcccagatgttcctaccctaagggccttcttttacagtaaatctctactttgaacctccttccctgttgcctagctaagactttcatagagcttttattatttgaaggcttcttaccacaaccacctccttctgtctctcctttcatagttgttgggtctaaatctctcctcaactgatcctattctcctactctctgtgtcttgtgtttttctcacattaaaatctcttggccctttaattctaactacatcctggtgacagaatgagtcaattttccccttcattataaaaagaagtgctacatggaataagtagggttaggtcattatactaagatccaaattctgtcatttttaaaaggtaaaattataatgataatcagataattatttgttggggctggagaaacttcctgccttcatagttaagagcacttgatcttctcccagagaacctgagtttattaactaagtcaggcagctcacaactgcctgtaactccagctcccagggatcaaggctctattctggactcttaagcctcccacatataggtggtgtccatacccagaaacacacatagataacaataaatctttaaaaaaggaaaaagtatatgttattctttgaggtttcttctttgctcatgtaataaataaatgcttagtcactgtgtctttattgctcataagttaaagaaagcatatggtcaaacttttcagtgctttgtaaaggaaataactttcatcaagcacaagtgcaaaagttaaaagtgtatgctacaaacctctctgttgtctccattctggttaagaagaactgctgtatgcagctaaggtacaaagttaggtagaaaatcataaagcagtgcacatgtgctgtgtgtaagtgattgattgtagctttaagtggtgctggtattttattttcctatcacatgctgatgtgacaattcattgagggtggcacttagtacaaccctcagatcaacccttaccctgggcacatagtttttcctccttctcgaaaacatgtcacacatacacacacacacacacacacacacacacacacacacacacacgaacaagattaatttcctgtttactgaacaagcagaacataataaatagtgtttatactgtagtagctcacattttaaaaaacttatggtatggaaaaacaaagtgtcttactctaaagcagttctttcttcctaaaggaacatacaatgatgatggctctatttcaatggctttattatcttaatagattctgaaatttttcttttatgcgttatatcatcaggccctttacccatgcttatacagctgggaaacggaaaatccaaattagttaagaacatgctagttagaattttaaagaacttagaggaagggagatgtgtgggtgatcatgcctgacacaccttattcttatgggataagaagagagaaaaccatgctggattgaaaaggtaaaagaaaagaagcatttcccacacaggttttgaagcatgcagttcaaatttaggtttttcagcatctcatggtatttaatcatcataggagaccccagtcaatgagaaaaacacagtgtttccaagatattctacttagagaaacaagtgtattagacatttaattctaatcttcgttaactgcaataaaagcgaagaccaggccattgtaaggtttaattggaaaatcaagtcaacaatttgaagtttattctttaaacaagtggctcttgatttagctgcacattagggagctgcgacccagggagcttccacagtctctccacctaggtccatgcaagatcaattaaatgagaattactgacatttctaactctacaggtgattctggtgtgcttccaaggttgatagagatttccttggatactaaagttattttaagctttcaattatatttgtgcaagctacaaattaagtgtctgcagctccatagaataccaagtgacctttaatttttgtcagagaattttaaaaagttacatttagagaatgatagctgactaatgttatatttgatggttagctttcaagtcctggaagtggctgtgcagcctagttttaagccctgatgtagaatagcatccttgatgtgtcttttccttcagggatgaaaactgagccctattcaagggttgaaggtcaccacttctcttattcccctggtccaggactctgcttaccgcctgaacagaagaggacatctggccatcacaaagcagcaggagtaaaaataaataaaggctaaatatgttgtctatcaccacacagaagctgagtcagacaggcagagttttctatgtcggggcattttctcccaaataaccacggagacttattattaattataaatgcttggccgatagcttaggcttgtctccagccagctcttacaaataaattaacccatttctattcatctatgtgctgccccacagctcgtttacctcatctatgaactcccatgttgcttcttacacttatgtctcgggactcctcagactgcccgtcttcttcccagcattctctctgccctgaaaatcttgcccagctataggcccatctttttattaataatgagagcaacacatcttcacagtgtacagaaggattattccacagcactccccccttttgtctaaacaaaaaaggaaggttttaactttaacatagtaaaattatatacaagaaaacagtgtcaagtaagaattacagttacaatatccaggctacttgtatttggcaaattcagagaaaatattctattatttatttttgtgagtttaaagttttatacctaatttaccttttatcatagctagggaaaactttaagtctaattatttagtctttaactccctcaaagaccctagaaggctgtaactgcagggacatctgtctgcctggacagtcattcaaagttcttctgtaattttgggtctctaactgtggcctacaagcctagtatatctatgaagcaggaattctgaaggactgtcccatcttgtctaggcaagtttcagcagtgactttcttttgtgtcctgcatgcccaatttggatagcatactgtcagcagtcaaggcaaggacagctttttgtccagtggctaatgtttgctaaaaagaaagcaaactccatatggagattcttcgatgcccataatcttcttttgaagtaaattggtgctgccaagagcagacatgtctcactgccatgaaaagccttagattattaaacacattaaatgccattttctgtaggtctttgaagtgtctgaagaccatctgtctatctaaatacatctgtttaatcttgaaaacatacctaacatgactacaagtttgattattatagatgattattaacctgtatttcttaattatacattatatttttaaatgagctgcataagcgcaatactccaaacgagagtagaaacatacatacaatataacaaaattaactttaaatttgtatcaataaaccaaaatccatacaaacataaactattttgagattaatagttgctttttgaattaaagtagattcaataatctacctttttatctcatcatttctatattgtaatcccctattttcctttagaaatagatctttgaatttaactctattgtttagcttttttcctaactatgaccaatatcgacttgtaacctgttgggcataaaaaggcctggatgcaaggcctagtggaatttcctgagcctgtctagagtttgtcaacctgtctcagcaaaactgcctctgcccagctactgctggcatcatgagatattattggcccttacacctcaccccatcctgaggtccccacccactttctcaatcctatataagcgcatgcctgttacaataaagcaagactctacttcgacaggtttccacgactcagtatgattctctctgctaactaggaggggagtataaatcgtcgacatcattctgctcagccccgggaagtgacctgctggactggcccttcccaaagccctgactgccagaggacctggcagtaaccaacccccatgaacaatgacaaacatttataatccactgaataaaccataactcacccatagcctgtctcatgggaatgtgagtattgttctctcaactacttcctattgtctgtgcgtgttggtatctttgggaaaaccttgagaaaatcaggataattattaggtcttggctggagtagttggcgagactggaccatctcagccagtacccttgaagctgttttggatagagaattctgaggagactgtaacagacattttgagatgctggatcacctgggccttccatttttattggtgtctggtctccttgttctgaaaatacatcaacttttaaaggtaacataaatttctgtattaatacaagtatagactctgtattgtacacaagttagccaaagatgattttttttcgtttcatgcttgagtaggtaaaatatacgtttcatgttttgtagtttttctagatttctttatgtctgtagtcaggatgttctgggggtcttccctaatcaaacctgatccatatcaacctggaatgaatccacagcctcccgtttttgtagaaataaaagcaaaacctctttcccaaagtaacataattttttatttcgtttttaaagttaagatagccctaaagtatctaggttggttaaatttagcagtccagtcacagtcccatgtctgtcagagctgtcatttgctcatcagcattcaaaaaatttaaaatcaacacaataatatacaggatccagactcagtgtatatttcccacctatgtggttttttttctttttgtatcacttttactgtctttaaagacttcattatttttaagttatttcttttaatgacacttatacccattttcttttcttaagcctatgccaatgttaaacacattgtagcttgtttagagtttttttcttctgtctgaatctgtctttggtgcatatctgtccttttctgaccaatgagtcgttaaactactaagcagcatggctaggacttttgcctcagccttggtggctggttccactacactccttggtctgtgagagatgagctctatgccccaagggcctgtcctagagctgcatttattaaccaggaactacattcaatcccctagttctatgatgccagtgcccaaccttaggcaagcattcttacttagtttgctggggtttgttgttgtcttagttttccaaggccctatgtggaaatttgggtcccacattggaatgccttttgtaggcagacttttctgttccatcagccagttttcaaataattacacagagacttaaatataaattataaatgctcagccgatagcttaggcttgtctccagacagctcttacaacttaaattaacccatttctattcatctatgtgctgccccaggttcatttacatcatctatgaacttcccatgttgcttcttaggtgcctggctcatgactctgcacttcttcccagcattctctctgtccccaaaatcctgcctagctaccagccaattagcattttattttattagcaatgagagcagcacatcttcacagtgtacaaaaggattattccacagcagactaaaatattacagttcagtactctgaactgtgatagctacagtagtgactaacttttgggatagagcctcctctaaggatgtatttttatcatatagaagtcatcaaaatttatagaagtcatcaaaaacttctacaaatttggagatctacattgagatcattagatagttaaagaatggctagttactgagttaggaacaaaaatcaaaggatataattcttttgcattattctgtaaaaatgaaaaattcttacttcaaacaaacaaaactcctatattaatccacattgacagcataggagggttgctttaaaagtgcatcactactaataattgggctttggtgtgttttattctccttggtgaagaagcaaatgaatagtagggggttagtgtgtacatgtaaacagttgtgtgatggagtatgtctgtagctccctttcttctggggagtatttacttgtcagggctctctgagtgtctggtatcttcactacagtgtctgctctatagtgcaagacaggttcctgcaggccttgaattcttgttcctcattctcctttattcaacattatcaaagaattaatggaagctggctgtgatggtgcacgcctttagtctcagcactcaggaggcagaggcaggcagatctctgtgagtttctaggccagcctgttctacaaagtgagttccaggacagtcagggctgctacactctgtctcagagaaagaaagaaagaaagaaagaaagaaagaaagaaagaaagaaagaaagaaagaaagagacaggaagaaagaaaaaaataattaatggaatcacggagtccagttaactaaagcaatttggaagcggccacaatgaatttggaatccagctcttaggaccaaagctagtgtatccccttccttcattgaatgagaaaagatcaccctcaaaattcttttttaatccctttcttttttaagttggcatacaaagcaattggtttcactgtgaaattttcatacatatatgtatatatttatactttgtttttatttacccttcaactgttttcttatgccacgtctcctctttcttgttgtggaacaatctttttgtaaatgtaaagatgtgtcactctaattggtttaataaaaaggtttaatagctgaacggccaatagctaggcaggattttgggggcacagagaacactgagaagaaggtggagtctccgaggagataccagggatacagagcaagcaacatgggctttacaaatgaaggtaacctagccacttaaaagaatgtacattaaaagatataggttaatttaagttctaagaactagttagaaacaagccttacctttcatccaaactttcataattaatagtaagtctccatgccattatttgagctggctggtggaacagaaaaatccacccacactctctggtctccttcctctcaaatactactgtctgctctcatgtcacaaataccccatcattttcttttgtccccctctcccttcaaagccctgcaccctcctcagtctcctttctagtttcatgccctgcacacacttagggggatgcatttgtcacaacaaagacaggcaaatatttttgaaaagtgtttgctcagcagtgggatgggacctgagacataagtacgacttctagcctagagaactgcactatcttatgtattatgctcctcgagctgaatgtctcaaaggacaagatactgagtgaattggaagataagaaattctttttttttttgaagggagaaaactaataaaactactttcaactttgtcttaataataatcagcttgttgtaagaagatgcaaaatgggtcgtgctatcgaatgtggaaactatcctgaagcatttcccattaagtgaaaattattttcatgtaattttttttttaatttttttatttgaattagaaacaagattgttttacatgtcaattccagttccctctccctcccctcctcccctccccccccaactaacaccctacctatgccataccctttctggtccccagggagggtgaggccttccatagggggggggtcttccgaatctgccatatcctttgggatagggcctaggcccatcctgtgtgtttaggctcagggagtattcctctatgtgggatgggctcccaaagtccattcctatgctagggataagtactgatctactacaaggggccccatagatttcccagatctcctcactgacaaccacattcctggggtctggatcagtcccatgctggtttcccagctatcagtctggggaccaagagctctcccttgttcagatcaggtgtttctgtgggtttcaccagcctggtctggacccctttgctcatcactcgttcttctctgcaactggattccagttcagttcagtgtttagctgtgggtgtctgcttctacttccaccagctgctggataaaggctataggatgggatataagttagtcctcaatctcattatcaggggagggcatataagaagttcttaagagaccatggtaattcttataaaggaaagaaattaattgggggcttgcttacaaaatttggaggtggaaaagttagtcaggctgggcagtggtgtcacacccctttgatcccagcactagagaagtagaggctagtggatcgctgagtttgaggccagcctggtctacagagaaaccctgtcttgaaaaaccaagttacagtcacttgtaattcagaaatcaagcaggctgagtgagggtgtatgagcagctgcctgggggagaaacttctgggatattcataagtgcatgtttcattgaggagacaattatgcctcccatcttaacatgcctttaggtttagcatagtttgtaacatttctggaacagatagctttctgaggtgcattttcctgtccagatttttgacaggcccatttggattaactctagagggtctaatacgattttataattttatcttttgatcagtttagagtgtatgtctccactcagtaccagagttatgactcaggtctctgagtcagaaaaatcttcaactgaacattttttaaaattgaactttaaaaaaatgatgaattagccatactttaccaggatatttatagcctttccttgatgggccaaaataaagccctgctactccatctctttcatgtagcatttatggagtttattttcataggcctctggtaactgtataacaaggtattttaaatattgaggggcagttgtgatacatcctcctttttttgtcttaattctaagaagaatcaactgtggtattttccactttcttaaaataggggtgttattagagacacagcaggcagggtccacaggggattatggtctccaggcttgtcttcgagctatcaaacaaaacgacaagcgttcttaaaacaaacataaagacacaggaaggcagaggcagaggcccaagccaggtaaccataagccaaggatcgcctggagcaccagacgctgcagacacatgggaagttcggtcactccttggggcttcaaaggggaccccgccagcccaacacttgtatttcagaactgttagacggttctgatgcttggcatgatcaagtttgcctggttttcttttaacgtgtctaagtattttgcctccatgtacaagtacacccagtgtgtgcggtgcccctggaggcccgaagaggtcgcaagatgccctggaactgggtttacaacgagcagctagctatgtacgtgctgggatcgaagccaggtcccctccaagaggagaaagttgagccatcgctgcaggccctgcggccaagtttgttacctaaattgctccctcggtgaaactgaataatgccttaactacatatcctgaagtggaaagggggggtgtatgttcaacgtatggtcgacgtttaaaacgctaaacttttatggagagcttttcacaatcgctgactgtgctcagctcagctcagatgattcccgagggtcttactgggtccccgagactcaaagctacagtggagaacagaacatggggaacacggaggctggtaaagaagattacacagaccgacgccggtagtttttatcctccaggctagactgacgaaaaggagacgcaagtgcaactcactctaggagagctaacggaacgtagcccgggattgcagagttaacggggcggtcctcgcgagaagcggagtctttcccagactcggcaggctctagcgtcactttccggcgccactgtctcgtcttcaccagacggatcccttcaagggccaaaagccgcgcagaccagctttggcagtgcggcgagggtgaccaatagaaaccggggacctcgcgtttcctcctaagctccaccccttgaccccaagcgccgtggcggaagaatacaatcagaggacctggggcgggaccaaacacggaagcggaagcggcgggaggtggcggaactctgcgagcttctggcacacgtgtgcggtgagtgctgcggggagggagatgcaggcggtgcggacgggagatgcaggcggtgcggacgggagatgcaggcagtgcgggacgccttccgcgggctgctctgcagccgggagactctgcggggccgtgggcgagcgggctcggagttgggggattggcgggagcccggcgacagcaggggttaagcccaccccgttacaatgcttaatgcagagctggaggaactaacttggctttcaaaccccggccggtgcgtcacggtcaccctgcccgtcctgtggcagaccttgtgcacaggagctgggcagggaaaactgaagaagcgacccataaacagacctaaagcaagatgggaggcaaaagtattttaggcagggctgaggggtaagtcccggtagtctgaattcgtggtaccccggacaagatatagggaagagtaggcgtttagagaccatggtgtcgggtttctgtattcttgtgtgttgggaagcgttgttctttatgttcctaagcacgtaaaacgtcttaggactattagaaaaaaagcgggaggttgcttgcgacaggccttgatactcaaaaggaaaacatgtacttaatttgcgagttcggtaaggagatttttgagcgtttgtattgagtattggtaatggagataaatgtatataagagaattgtagggtaacttactgataggttacaggtgactggcatataaaagaagtaaatgtcgggaacagtgccggaaagtagatgatgccccactggctacggtgagaatgggcagtatcattgggtagtttgcagtgggaatgcagagaattacatttcagatattaagcctaaggtgccagttatatgcatattcaaaaagtgtccaggacaagtctaggaagtaaaacctaatttgcttgactttgcctttgggttggtcataaattaatttggtagtgaagatacttggcaaatactgctttaagtgatcaaggttaacttcaggagtgcatcgtgttgctacattgctttggtacttctttgctatctggaatgcccaagcccaagcataacctcagcctagtcatgaaaatcttagtcgcaaagaggacataacctgaaaaatacagagaaaacatgatgactaaattaactgtatcttgggataggaaaaggacatgaatgggaaattgatatacaagtaaaccttattatactagtgttaatttcttagttttattacagtgccatatgttaacaatgggggaagctgggtaaatgatctataggctctatctttttaactttttgtaagatacattgttttaaaataaagtatgcagatttaatatctaaataaaggtattcaaaggccagtggcacagttggttagcttgtggtatttgaatgaaacctacatgcagaaatgcaagtgataaaatgactatacaatttaaaatgtccagtaggaaacttgagtagctccagtgttggaattataaatacacatcattatatactttctatgcagttctagacatcgaacccagggcatgttccagtgttccctggagaaagtgattcaatcaggtttggaaagtcttgtatatttcagtgtttgttttccaatgggtagttcatagtagcaaattaagaacttggaaaatctttccttacttgctgactattgctatttaatttactatttctcaaatacattttaatgtggaaccctgctttttttttcttcccaagactttcaagtattctgaagaattaatcatgttttgttttgatttttgaaacaatatctcactatgtatcccagactagcctctagtttatgttgccacagtgattcatctgcctcagtctctcatagctaggattacatccagcacaaaattaaatcatgcctggaggtagtagtgcatgtatttaattccagcactctagggaggcaaaggctgtcgcatctccgtgagttcgaggccagcctggtctacggagctagttccagcacagctagggttgttacacagagaaaccctgtctcaaaaaaaaaaaaaaaaaaaaaaaaaacaagaaaaaattaattcaggaatggatatttctaatctggaaacattgtctaggacttctgcaggtgactcttaaggtcatttagaaatgggtgagcatgtaaccatgctcgaacattttcgaaatgtagacatgagcctggtggcatttgcctttgtatccattagtgttctgctccttccaaagcttgtaggttggtgagaggtgtctgctactttacctatgcccagtgaaggtcactgaagccaacaggtgatatgttaggcagatccctctcaattaaatattaaatagttcagtgtgacttggaggtcagcaggtcatctgactgcctctaaaacagttggccaataacatttgttttcgatttattgggttttcttttattaaattgcaacatgtgcaaaatgcatcgtgttactggttcctggctttttaaggtagatgcccaaggaatcaaagggtaatatcaccattactcatcaccaagccttcccaggttaaaagctgcagacagtgtttattcttaatagtggtctatattagccagtgctttgcttaagtgttgcctccaggtgtcacactagccagggtgtgtgcatgtcctgcgttcttgtattggtatcttttgtgccctctgttttaatgtcttagaagtaatcatgtacttggtggacttgagaaccaccaggctgtgcctggatgctttatcctgtgtctgcacttaaggactgtgtgctgcactatttaatgactcttattggatagcaattcagtgattctttatggttttggcttttgttttccagaattgctatgatggaagtcaaagagaagaaaaaattcacaggaaaaagtccaaagacagcacaaggaaagactagatttcataaaaaccgtggtaagagagccttctccacatgcttcccgtgtgctcattactgtgaagatgtggtgtgtctgtggtggggggaggtttgtgttgggtactgagctcttcatgggctaggattacaataaacatggtagaaagaagtcaccactgctgtccataagttaacctgttagaaattgccagaataattgaggaatgttttattcatgaaggaacttttgtgtcagcaatattcacatttgttcactatacaattcattttcatgtttgatgggctgaagctggctagtacactcagcttttaccttctgaattttaaaatggtgatgtctctactagtccatcaggtgtcagtattgcagagtagaagaatccaggcctatatagataagtgtgtcctaagcagtcttatgctttcccttgtagtggtcttaaggcatagctattgttgtcatcctgtctgttagatatgtataagctttttgactaaaacttttatccaaataattttattataggcttaaagatttttcttaaaattagacattttcagaaatacattttaattcatttttatgatatgctttcttaacttcagtaactatcttattgaaccattgaggttttaatataaatattaagggtagaacaaataagacagagtggaaaggtgcttactattttatgtctggaatatgcttaaaactgcagaaatatgccatgctagcaatagtggtttctaggaaaaattatagtttattattaattccgctacttcctggggtttacatagttaacctatacaattttataatcagaaagttttctcttaatttaggtttgattatttaaatgctaatttattcaaaagggttaatgtttatttgagagtaaggcatgtagttctcttcagcatacagttgagtaggtaccagttaggctcagaactaatatgtattcatcgttatcactagattctggttcttcaaagacattcccacagaaagttgtcaaggaaggtggccctaaagtgtcatctaagaactttgagaaaggtgccacaaaacctggcaaaaagggtgtgaagcagttcaagaacaagccacaagggggcaaaggaccgaaggacaaattccagaagccaaatacattcaacaagaagaggaagttccagccagatggtaaaagcgacggtaagcatgactcttagagggatgactagaccttggtacccaggtcctctgctgtgtcagcgactgcctgcctgtccttgctcctagacaggcagcattttggagtggaaggaaggcagcacagaagggcttaagtaaacaacagcatgcttcctcatcaaaacatcttgttctggtgctggtgagatgtctcggcagttaagagcacttgttcttgtggaggacttgagtttgattcctagcaccttcatggtgcctcaaaaccatctgcaactccagttcaagatgttctgtgtcctcttctgacctcaggcactaagcacacatgtggtgcacgtacatacctgcaagcaaagcacttgtaaaaatgaatctaaaaatgtttttaaactttctcatgcttagagatcttcatttctttagccaaggaattaagctaagttgtgtcttttgcaggaaacttaaaactttcctttctgaaagccaaactgaaaacttatttgttcattcattcatcacatacttacctttttttcacttttttaaagacattgtctcactctgtagctctgggtatcctggaacttgccatgtagaccaggctggccttggattcacagatctaccttgtatgcactatcatgtccaggtaacttgtttattcattgtgttgagagataggtagttttaaaatcagtaacagaacagggccaaactgattgtagaaactgaccttaaagacacagtgtgctccagctaaattgccagttgtgttgaattaagagatttgtagactctgtccttatgctgcctagaccagtcaatatgaacagctcgttagatggttggcatttagtaatagttctgggtatgtggtccacacctaatagatttagccatttcattccttcaggacaaattgctccctaatgagaattgttcctggggcttctgtttgtctttagcataaactgccaatctttttgttgtgatatccatggaatcacttctcaccagcaattgtacaccagctcagttgtacatcatggcctggatgtgcctagtcccttattggtttcaggcaagcagcttctatatactgaactacatattccatcctgtgccattgtgagagtttttggattatttccctaacacagcgtgtgttcttacatcgctccatacctgccagctgagattattgcctggcacattgtctgtctagccctctaacctgctccttaattcttcagtttgtctaaggattgcttgctggaggagggacagcatgcttgaggtgagggagaggaatttctctcagtgtgtctacaaaacctttccccactccagtcgggttttttcttcctttcccctatgcccaatatttgttccaatagctttttttcctcctctttttgtagcttgtgtgatagttttaatggggaatgcagagaatctaataatgttaagtataaacgctaagatttttgcattttaaagatcaaaacagagaagaaaaggggcaaaaaggaaataattgctatttatacctaggttttagtgtgacttagtttactttttattgttttggtttttgtagtgagtgaattttatgatcagagaggtttagacataactaaattccaaaggatttggggagagatacttatttaaagagtagtctaatgaaatattcatttcatctatctcattggttggttttgttgtttaataatataagtaagtttcaaagatacaggaataggtagatactcaatttttatatcatcactctgtggaagcttgctatgtgttgtcatgagtgaaagtaggttgtccctggatttgtatcttgttctatcactgggtggccttggatgaatgacttactgtgtgatatctagtataaagggggtaatcaaagttgtacccacctcacactgtaagaattaaataatgcatggcagcactgctctcctaacggtgttttacttctggttttgttttatttttgatatttggattgaatgaggaacctcatacatgcaagtgctgtaccactgagcttcaccaccaaattatatttcccccttgtagcttctagaatgagtattggtcctggtgattgctctctgtactgaattcgtattcatatatagtatttggaacgttaaatgcattgaatctaattctagaatcagcagccaagaaacccaaatgggatgacttcaaaaagaagaagaaagagctgaagcagagcaggcagctcagtgataagaccaactatgacatcgtggttcgagcaaagcacatttgggagagcttgagaaggtactggcacttaacagtgtcgttgttagtctgtccgagacaagggaaacacaaaggtttgccctgtaaactgacagatgttctaaacatcaaagacacacctggtttctttgatgcatgctcagtcccctgtcacagcagcagtgtgggtgtgctgagtgcagaaatgtgtgaaatcattaagatagtgttagataactttatggaaatgatgggagtcaaatggatttgatatctatcctgaaggatttctcagaaaatgaagggcaatttcttatcagctaggttttgagatgctttaagtatttgctatctcagattgttttattatttttctttgcttctgaagttctggctgttaagatttagattgatgcataaaattataccttatgagatgagttcctgcctctgagaaaattacttttgtctggctgctccagaataataattttaatgtcagaggtctgctgccttcaaaggaaaaaccacactgaactgtcgaatgtatattgcatgctgtttggttttcatgtttaaaataatttcacctgcccttcttctgcagaaaagactgtgataaagaaaaaagaaggaagctgatgagtgatttgcagaaattgattcaagggaaaattaaaactgtgagtagaatgtgctcattccagttttttaaaaactccagtttctttgctcttagggaagcatgttctttgtatgtggttatggttatcaatgcagcaacagttcaggattggtctgtcccacgtcagtacctggtaattcataaggaaatgaaaccacagttcatggaatccttgtgggtgtagttttaattagtactggaatttgaaaggtggtagacttttctgtctcttgcatctatttcaactatgaaatgtgataggaagcaaagccaaacaacagcacaccatataattagcatatttctgtctcaaacaggctagtgcagtttaagctgaaaaagtaaattgtaataaatggtgtaaatagtagagcatgatgaatggttcagacattctgagtctagaaagctgcaactgttgcctacagattgctttcgcacatgactcgacacgtgtgatccagtgcttcattcagtatggaaatgaagagcagaggaagcaggcttttgaagaactacaaggtattgttaatataaagtgttttttattgcttgtgataaagtcacttgttttcttttggaatgccgaagattatccaagaaagttgttccatgttttctgcaacactgttttcgttgctgtgctactttgccagccaagttgagtgagccatgttccagaatcatgcttgtgtttctgtcttttctttttttctggagaattgaagtgaggctaccaggtcatgttttgttttgttttatcctaccaggtgacttggttgaactaagtaaagccaaatattccaggaatattgtcaagaaatttctcatgtatgggtaagttgttataaagtgtattttttgcttggctttcagttttgtggattcatctttgcccaaatgttactttaagatctctggtcttagtaattacctccaaacacttgtgtttttcctagggcacaacaccttaaaataactgaaattgactaaaatcttagtgctgctttccctattgttgaggacctacttttatatattcaagctaaagagcaaagcattggaataattcacctaagttaccagtatttagagtgtagaaagttgagaagggcagatgaacaaaccctgaggtagacagaccattgtgttagcacgtgccagggcaggatgattttctgaatgctgtgctgctgggtcttacctagacggcctttcaggtgtgagaatcagaataccatagcggcaagaattcttggtgagtattaggtgctcaaattctttagaatgaatcctgtttttaagaaagtagtagtttattttatttccatttgcctccttgattctgtccttccctgactttccttgtggtctagttgaaggaactgagggggcacttcctgtgtgcgctgctcgctgttcttgatgcagcttagttcatctgattctcacagcagctatgtttgtattgtgaatggagaagctaaagactctagggctggagctggagcttagtggtagaacattcaccttgcttgcatgaggtcctaggttcagtccccagtactgccaataataaattaagaaagaacctgcttgcctctttgagttggttggcagaactgagctttctcactgaggactgcagcctactttgtcttctataaacattgaaagtgcatgccgtttgatttgcccactcaaaagctttcctatataggagaactcccttctgtaacacaattattggtgagttgaggtttggaaagttgtgggtttgtttttacccagccttcttctgtcatttactttttctgcgttcttttgactttagaagtaaaccacagatagcagagataatcagaagttttaaaggtcacgtgaggaagatgctgcgacattcagaggcatcagccatcgtggagtatgcgtacaatgacaaagccattttggaacagaggaacatgctgaccgaggagctctatgggaacacgtttcagctttacaaggtggcctttctggtgttctttccctctgtgtttatttttctgtgtggtttctaagtttcagggtcctgtatttaagatatgtttttaccaagctgtgttctcctagattatattgtctatgcagtagggagcaagtggtcactccatgctttctcctcctgaatgctgcctttaaatcatctttggatcattccatttttgttgcttccagctggtgtgtgtgtgtgtgttgcttcatcatgtctctttctgcagtagctctgaggtgcactgggcttcctcttgttacttgtctcatatttcttcctggttttgccttacctttgtctgcattggctctggagaagaagggttctagcgatttggcattggatggaatataaagtttaatctgagaccagccagtgatggaactagtattgcacgatttcaaacctgggggcatgagtgtacagcttcagttcctaagttgaattgctgcaacattgctattgtgacacatagctttgggaacatctggcaattataaaacgcaccaaggcaaggatttttgattaggtacatgccaggtgcttggtaagacctgatagctggcaatttggttggcggttaaactggctcttgaagtacaaccagctcccatttccctgacttccacatcttatgactcaaccaaccaaaaccattaagaaaaaaaattatgaaaaaaataagtgccaggtggtgatgatacccagtctttcatccccatcactcaggaggtagaggaaaagtggatcgatgagttcaaggccagcctgctctacagagcaagttccaggacagccagggctagacagagaaaccctgtactgaaaaaccaaaaggggggaaaatgtatgtctgtactagacatgtatagattttgttccttattgttttgtaaaaacatagtatatataataactatttgctgagcgtttatgttttgttatgtcatgtaggtagccttgagatggtttaaaatatactgaaggatcgtatgggttgtatataaatactttgttgtgggactgttaatatcaccaggtttttgattcagtggaagttgctagagccaaccctctgcagggatgctcacacactggcaggtggatagacggagactcccaatctttgaggaactgttctgtggacattcgttctagaactgtgaaacactgcaaacttactttaaaatgtttaacatggctgtagttctggcttgttttgaagtgatgatattggtaggcatttgatttttcttctgtttcagtcagcagatcacccaactctgggcaaggtgctggaggtgcagccgggaaagctagagcttattatggatgaaatgaagcagattctgactccgatggcccagaagtaagaaaggcttgatatttacagaatgagaggtgtttgaaggagccacattttacagaatccttgatggaagggaggcattttcctccctactgttaataatccatcataaataagagtataaaacattttgttggaaacttcttgatgcaggtagacatgactcttgatattgtgtcttattggccaatttgttatgatggttgtaaacattcttaaaatgataaaactttttttttcttcaaagtaaagtgttatactgaacctttttatgttatatagctttatacaatttattgtttaaactgcactgtagacttagaagtttgtgcttgttgccttcatggaccaggcaggattcgatgctgcagctgaccttgttctgatgatggaacacgcagaaactagtgactagtgtatcatcttgctgtagggcctggaaatgtgtatcctgctcttggttgtgatgtcactaaaccagtgttacagtctaaatttttttaacatcttagtattgctgaaagatacatttgatctgtgacaaattgtatttagtaaaaaccatttcacatagatgattttaggactgacagggttacctgtctttgtgttgctgtttcgctagatatgattctctttctttccatttgcagggaagctgtgattaagcactccctggtccataaagtgttcttggacttttttacctatgcacccccaaaacttcgatcagtaagtccttggtttctgtctttgcattggtataaaaccagggtggtggcacacacttttgagatttggtatttgggggccctgagataggaggataactgtgactttgaggttaacctgggctccaaagtaagctctaagccagcctggactgtggtgtgagattgcactcacaaaaacaaaagcaaactgaaagtgggaagggaaagccattgggacttgcaaggctgctcagttctttagaaattccagggttcctttctcgcttagatgagcactatttaggcactgatctgctaaatctctttaattccagtcctccctaccccccaaaaaaagaaaagaattttccctagttctattaatggcactgaaattttatattttagttacaattcagagagtctcctagctaatctaatctggaaggtaatttacattggaggattcttcagtgttccagtagtgttaaattttttatttattttttttaaaaaaccatgcctactttgaaaggttaagggaggatacttaatgtgaaacgaaatggtccatgaaagcctggatcttaaatgacagaaggcagagggccagtgaaggtagttgtagttgcactgcccttcaagtcagcagtgggaatacaaatgagaatccatgctttagttcctgaactttgcttgcctcatccagctgtgacctgttgtccactggtgctcattttctaatcacaaggtctgactgaaacaacacatctgatttctcttaaaattctggggaattttgaagccctccaattagcatatagaataatttctcttcagccccccagtcttgtgacccaaagaacagcacttgctctcttaggaatttccctcttcccttgtagaactcaatactgtgaagtttttgtattgagagtttggggaacagtagaagaccacattcagtcatagcaaacattccgagtggcataaggtgatgagaccttggaagcataattggagcctgagttaccctccagctttttattcattctttgaggatttcataatgtatgtaatgtaatttgatcatattaatcctaatttcctccagatctatcccccccattccactccatttttttttttttttaaataactcacggaattaagtttgggctccccatatactcacagttgtgggaccatctgctgaccatactgttaaagattgtcttcttcctatataagctatccgcagctatcagaagcgcttaagctcctggtgggtgtttgtgagtctctcctcccccaagctagaatgttgactggcagcactactgctgtgagttcatggatacagtgatctggtccaggaaactgttgtcactgtgtctcctagaatctttccacccactctgccacagtatcacctaagccttgagtgggggagctgatctacacgtcccatttaaggaggagcacctttggaggaattctgaaatttcccctgaaatctagtcttgagattcaccccaggagagggtggtaccttagggtgaagtacagctctttctctttccagactttgtatgtgttcccctgatgtaaaatttttaattcaggatccctatagctattgggttccagaactcatttataaaatatcctaggtgctcagactttgaaaataagaaattaaatggttttttcccccccttcaatttttataaaaaggttatctgtgggtaatgtcctgtcctaaatgttaggtcagagagttcattgagaaatattagttaagtgttttggtacacagttcatatgacttgtagagtggtccggtcctgaggcaaactatatcacagacactttggtcaggatgagttttggttgtgtttgtcatatacacatgtggaggagtgtgttcttccccagctgttgtgtccaacacccccttagaaccgctacccctgctgctgtttctgtattcattgcagtttatcacacggcgcctgttagtactttcaaatagatataagggaaattatgctgtttattggaaattgctaggagctgcattttgctgcttttttggaaaagaatgtgtctagaaagaggctggctgtaaaattaaagcctgcagtgttggctgcctcggctccttccttatcattctctgccttactgttctccaggaattaattgaagccatccgggaagcagtggtatacctagcccacacacacgatggtgccagagtggccatgcactgcttgtggcatggtacacccaaggtaagtgtcagagccatgccttacctgccgtctgggacttgatccttaaactttgagtcagctgcctttagtcttactttgattcccagttgtacagaagtgtcatattctggaagttgtgtctcagggccttccagggctttggcattttcttggggccctgtatttttctctgctttaggagagacccaaggtttccctgaagattaggaatagatcctccaagcagatgacatgtttatactcagttttggtttacaagggtttggggacctgtgttctgttctttactcttcatttaacagtcatattgaaaatgggaggaaggcagagataattagtagtcaactataccatacatacattcctgtgtgtattaaatactctgaggaaaaaggtgaatatccatctagatcatagaattttacatatttcattcatcctttaaatgttagttgtgttttatctactttttacttattacagatttaactattgtacaaacataataaatacatctgcatgctagattcttaaaggcaaagcagacattggaagagggatggttgtaaagatgacttcactaggtttgcctgtgccttaggatttcatagttccatatttgtacctaaatgggttgacataagttgatgattatatagtttctcgtaggggtgttttggctcgcactgcaatgttttccattctgctttgtaaactggtcttttcactaacgaagagatagtgctgatgaaaatataatactacatttagtaatatttataataaaatattaactgtgcagtaagcttaatctataaataaaagttcattgaggcagtatttcctttttaaggacaggaaagtgatcgtgaaaacaatgaagacatacgttgaaaaggtggccaatgtaagtacaacaaaagcctgctcataaagtcactaagtgaggtgaatgcgtgtctattggggaaagttgaaaactacattaaagtgtttaatttttctaggttaatttgcacaaaatagagttcatactctagttgtctctctgcatatgaattgtttgtatgtatgcatgtcttgctatagagatcaaagaaaggaattcctatgttctaggcatgtgccctgcctgtgcactacaccccaggccctatttggttgtgttgtataaagactgttatttatacctgtccccaactttagtatctgaacatagtaacccttactgctgcctatctatttaaggaaaaatgtcggattgtcattgagaaacttaaaactagtttttgctaccacaaaaccttaataaattaaaatttgtctgttttcttggtataaatttatagtgtcataaagcagttcggctattaaatattttagctccttggaatctgttggagggttagcattatttctagctaggaaagcagctcagtggataaagtacttaagattgagctctgacctccacacatgcatgcacatgagttacccccacacacgagttaccagccacacaaaaataatagaaatttttgtgtatttagatgttgaaagacttttccatactggaaatacaaataagtgctaaaactagattatttgtggtagtagatacgattttaattatatatataattcagtaaattataattattggtgagtgggaagtgctttatgttcatccttttcctgtttaaaaaaatccaataggaacaactaaatttgtcatattgttaattcagcaagtgttgttcagaccaaggtaggatggatgctgtttggtacaggtgatcttctgtggcattgggaatgactggagttaagtgtgcaaccattcggtaggcagctaacttttctgtgaggtgaaatgtggtattctttttcctgcttagccaggctatcttctgggtacttgaattgtttctagattccctaaattatcagcacccagtaaacattttgtatgtgtctgcacatatgtggaagcatgtctaagatacatgtctagaactaaaattgctaggtgagaatgtaacatgcatattgtgttaatgttgccaattgctttccaaaaagcaaaccactttacattctaaccagtgtgaagatgactgctttcccccaaaatttaaattttaagaaatgattgtaggtgcagtgtgtctgtgtatgtccatttctactcttaaaagcagtgatttttatcttgttcttgggttcattatattttatatggtttgtgtgcttttcttttgttgttgtgtgtggatttggggaagcttcttttttgtttctttcttttggaacttgtgggtttttgctgtttaagaagagacccaccatgtagcctctgaaactcaactgtgtagacttggatgttctcaaacttacagcagtctctggtctcccactattaaatacttacaggtgttataagttataacaatgcctactgtgcctagctcttgtccaatttttgtatatggtttgagttttgttttatttgttctcagtatttgtttttaaatatctatagctattttaaaagaaattcgacaatgtgcaataaatgcagttggacaaaatacaataaaaataatttgtagtcctttgacccagggatcactgttagccttctagaattttctgtatatgtacaaaaacgtataaatgtatatataattcatacttttatggatatatgtatatattttataatgtgtatatataagtcatgctttgagattatccatttcttttttggtgatttgaatagtttctgtatgtagttttatgcagatgccctcctccctcaaataatatttcatttaattgtctcagttaaaattttcaagtactgggttttccttagatgttgcatcctgattcttgggctatttaacaaataatgtttctctttttctttttcttttttgttaaatcatcttatcttgaatataactagctgttcatttgagtgactttgactcaccctgtttgcataagattggacagattattgtgtaggctctatgggcagggtatgtaagagggaaagttttttgtttgttttttgagacatggtctcagtacatcatgatagcatagatcaggctggactcaaactgacagagatctgactgcctttcaaatgctgggattagaaccatgtgctaccatacccagctttctaggtttgctcttattttgtcttgttaattttttattatagtaagttatttatgtgtaggggataggtgctgtgcacatgtgtggaggccagaggacaactttggaaagtctgttttcttctcccaccatgtaggttctgggaattggactcaggtcattaggcttggcagcaaagtgcctttacccacaagatggttttgccagccctctatacaattgttttttaaccttctctgtctccccatttttcagggccaatactctcatttggttttactggcagcatttgattgtattgatgacactaagcttgtgaagcagataatcatatcagtaagtattgtggatgggcttgaattggttatgtgccagtggctagtgctggagtttcatttcacatgttatgtaaacactttgactctagttgcctcagttgtatcttattttagaggcttgttatgttcctgtatgaatcccaaccttgtaactggatattagttgttttaaacacctaaataaccatggttaaaataagacttgacatttccacttcgaattaaggttgcgtggattttgtttttttgtttgtttgttttgtttttttaaagcaaagcagtactgggatgtgattggcagttgtcttgtgtaatgattcttgagtttaacacacttgccgtggacaagcagctcctgcatggttttccagttcatctgtccctatgtgcggggctaagctggtgaagagaacacctaaaacccattcatttgtgcttgtaacatccttctgttaaaacttccttcttatgccttagcaattactcctgtctaatacaatgaccatagggtggtaatccttgagtaaatatcttcatccctgaacttttggaactcttggaaaagctgttccagtgtagacatagtggttggaactgtgtgcctcccctccatcctctgtggccctcctttttctcattctgattctgtgagcttgccttcctatgcagtgtgcacaagtattgactgcacaagagagtgccaaactagggatgagaaattacagtattggtagcaatgaccaaagttggaaatttttagaaacagctgagtttttgtaaacacagatttttttttttcctcctgaaaatcacatgcaccattgtgtttgtacatgaatagagtcttggagaaatcttactgacgaacgagactcctgcagggtctgtagagaaaatgcctgtggtgaggtgggggtgctgtggcctctctagtccagcagggtgtttccgagtttatccataatagaagggagggactgggagtctgttttcctagacggcagctggaaatcccggttgtgggtttctcatgcccttgctgccactttccaactttgttcttgattatttgaaagttctggtgacttttgggggaacaggattgtgggaaggaacaagttggcaagattttgtgccacagactgaatattttgacatgttccttgtgactttagtatccttttgactccagtcaatagtgattgttttcattcctgtgacagagatgtgacaccatagaattgactatgaataaagctgtttcacagaaatggaaactgtctagcctattgaaaagtttgcttttgtgtaatatttcacaaaaacaaaaatgtgcataactgttccaaatggatttcaagggaaacaagctcccttcaggacttgccagattatcactgggttagtctttccctgcgatttatctcacttcaagttgctgttgaaaccattttcatttcttgtgcttatctgtttgaggtccacagctatgggatccacattcctaaagactaacttgaggcatctctctctctctctcatggacatgccactcactgacaaatgctccaccggttctgtgtatcattaagcccccaagttagtgataaagttgtgacatgttcattgctcttgtattttctcacccagccaccacagaatctgttgcaaggctttttaaaaataaccaggaaagttgagtgttgccaagctctccattcagggtatccatacttcccagaatgtcaagttggaatcacaacacggtcagctctacctttctttgacctttcaaaataaattcaagctgtctcccatctgctttcctttccaaaatgaacatacttccaaagaaaatgtgatcccatttatccgggtgtactttggctggtttcatggcagtgttcttaaggaaagggatgggtagcctagccagttgccgtctgggaatgaagaagtattgatgcatattttaaatgccttatctttaataaataattcacgttacaaagaataatatatcaactacttagccttccatcatgtgacacaaataagtaaaacctgtctgatcatagtagctcacatctataatcccatcacttgagagtccaacaaacctagattattgccatgaatttgggggccagcctgggctcaatagtaagatcctttttttttttttcttcttttttgtaaagggccagatagtaattatttgaggccttatgggccatgtataatttgatttgactatacttttaaagaaggctttgcaataaaaaagaaaaagtaaaaacattcttagcttgatgggtgtatagaaagtgggcacagataggatttgacctttggaccataattttcccacctttgtgtattttgtttattttcaatgacaagtaggaagtagtccactagtgactgcactgaaatttatgggttttatcttcatggtggtagttagtgtgtttcttaatactcttgcaaactatgtttttgatctcatatatgtagttcatttggtagattgcttgtctcatgtccctgaagtcagggacttcatacaccatactacataaaccaagcattcagcactcgacagtatccggttccatttcagcaggtagccagtgctagctactgtcattgggtatcagaagaacatgactgtgcagaagttgagggaagcctgagattttattatgagactcttgagttttgctttcttctaagctgatggttgatcacttaccttttagtttagtcccttgtactactaaaatcactagtttattaataaatagttgttgggtttttttttgtttgtttgttggttggttagttggtttggtttggttttgttttattttgttttttaagggtagactggggactggagcagtggctttgttctgtggttaagagcactggctgctttcccagaagaccctggttcaatacctagaacccacacagcagcttcgaactctctgtaactctaatccttggtgatccgataccctcttctggcttctttgggtactgcatgcatggtgtgcacatacatgcatgtagacaaaacacccatacacacaataaaaatgttttttaattgttaaaaaatcaacaatcctgggtatatgtcatcttaagaggataactttgtttcagaggagggtgtgtgttttctttggatatgacagatttggaatcaggatcaggactagtgagatccctgcttttaatcctgtcctgtaaacttacctagtggaagagtgttccttgtgactccaggtatcctgtttgtgtttcttactgtagtaaacagctttcatgtgctgtgaataagcaacccaactaagcccgtgccaactctgtgtttaacagggaagactcctctcttttctcagcagggaagctctggggcgtgtacttcatcaaggctcatgctacactaagtgtgcctgcaaattgacccttgtctactcagatcacagaagatactgtccttagtaacagcagcccaagaaatactcctcagcatgaatggagatagctcttctaagtttttaaatgtcctcacttttgatcagttaatacaaataggttgttcaacagtgatggccactgtagataattaactatgttctgaatataagtctttgtgttttgataagacatgtcagaattaacttcacatttgctattgggtacactgagggaaacagccaagggtgtgttcctcattcacatcaaatcccaaccaacatttgagaatgtaaataacactgcaaagggtttttgttttttgttttttttaattatgtaggaaatcatcagttccttacccagcatcgtaaatgacaaatatgggaggaaagtcctgctgtacttgctgagtcccagagatcctgcccacacagtccgagaaatcatcgagcttctgcagaagggtgatggcaatgcacacaggtaactggcagctgatggtgtagtgcctctgttcctctgcctgagtgcttgattctttgtgaggggtgcatgctccaagacaacctcgtacacaaatccctctctccctctgtttccctagaacttcttggttaattccattgttaagcctgggcttttgacagcctcagatcctaccttgaaaggaaatggcaggatcgggctgagaagattccttcttgagcagccacctggcacccagtaggcattcaaatgtgtagtttggtttttgttttgctttactttcaaagctgctggtgtcatgtattttaatgtcctgagaacagagtctgtgaagtattctgaacacaccctgtcttgcatgatgatttgtcattgtttgttttaagattggctggatttgggagggttgtttgtctggagtgtacaaaacagcttcctgtattgaagtcttgttccttgccaggtagtgttaagatcttgggaatggaaagatgaagcccagcctgtaactttcactcactcactgtctgcatcctcggcagaaggatagacaattacgagagggtgccctgtgttgtgataagctcctagaggtttgtgataacaagatctgccatttatcttaccacctcattcaacatattcccacagtaagaaagacactgccatccgccggcgtgagctcttagaatccatctctccagctttgctaaaccacctgcaaggacatgctcgagaggtggtgctggacaagtctgcgtgtgtgttggtgtctgacatcctgggatctgctactggagatgttcagcctgccatggatgccatcgccagtttggcagcagtagaactacatcctggtggcaaggatggagaggtgatgtgcagttaatgatagtactggccggagagccacagagactgcaaaagccccagtctcggagactacagaatgctaacaatattgccaatagcacatttgaaaatgatccgagtgccatagtggaggtgcttgtccttcccagcaatgcagtaattctacacctctttaagtcgtacatgctatgactctttagatagctgtgaccggcccgttcttgcctttccagaatagtgcattcttgctgtggctgctgcttcctccagtgtgaaatgctatccttttcattgccctgtgctccatcagtacaaagaaaggctaacttgtcctaaagcccacaattctctgtgaagtctcccctaattttagcgcttaggaaagatgacttgctgaaccaggtgtgtacttacaaacctagacttgagggatagaggcaggaggaatagaagttcaaggttatcctctgctacataaggagttacgggtctgcctgagctagatgagactttgtcaaacaatatagttgcttattctcatcactcttgcttgtatttacttgggcatggtgtgattctacgttacatcttaaggtcactgattacattaagagctaaacagcaccccaaaagcttgccactcgaaaggcacactgtttgaataagtaaaataattatttaagttaatattgaaacaaaaactatgaatggcaactatgggttctgtggggttgtgtaagacccagcttgtccccaggtagctttcctagaaatgggaagagccaagctgagccctgaagggttagcagcttggccaagaaaggtagaaagagacattcgggctatgtggaaggtgtgctgcagccctgaggaagggagagttactgagtccaagactccgagttggcagtagcaagcaaacaagaggaaggcagaggccagatcacacagggcctttgtcctgtgctggcttgtgagctcacagctcagaactagctggttatggggaactaccattttttgaagctttgatctctgctgtcacttagtctcacaaaagcctttatgtgctaaatagagtagccttttattataatccctggcattgcttaaggatgcaaaataagctgttcaagttctaagcttttcactcattaattgaaaaagcaatgaatctgtcaggagtgctttaaaagatactccctgcctttagagttgaatccactggagagacatatgcatgtcacttttatgcatacctttatgttagctgaatgctaacatctgcattttagtccagtttcggggactttaaactcgtagtctatgtagttccaatgaacagtctactggaagccttatggtaacagcactgaatcatcacaatgcagaggtgctgctgcactgggccagtctgcctcccctgctgagctcttctgctctaccatctctccatgtgctgtgttctagtcatagccaacttctactgcctcagcatctctgcccatcagggtctcaggcagaaaggaaagcgagagcgatggggccttttcctgaccagaagacagtctccaggcaggctttcctgccatgtcattacctaagaattggtttgagtcacatcagcttccagaccaatctctggcagagtgactgggtagctaggtctgcttacagccattgaaagtgtggcccataagaacacagcctttagaggaaactagttgggggctacctcttgagtacacagtccagcatcttttccacagcatagttctttccatctctaattccctctagccttgggttaagtctgaccctcagcaatgcttaaccatgcatttgattctgaataaaaaggatgcatggtattgagtgcctggcatgctactgacaaatggattggaaaaggccaatgggttgtgatctgaagctcaggcccctggcttcctggagcagatcagatgaatgtgtgatgaaatactgctctcaatggaaatggtgctcattatttctcatactaaatgaggggaaaccgctgttactgtgggaacagttgatacggccagcaaataagctacagaatgttttcatggcctgctcatgaggtcatggtagtgaatggtatctaaaaaccatgtagtattctcccaagaggtctctttgtatctctgataagtgtattaccataggaagagttggcaggtttacctcatttttagaacattgtatggttctgttcaaacaaacttaccaatctctgaactacctttcagggactgtggtctcccacataactatacatgctgtatcctgggaatgtgatgggtattctaggaaaagatttcttaaaactgtgaaacctgtctgtatccatgtctatacatgggatagggataggcttgtgggctagagatggatgacagcttttgaaataacacaattctgttctcttgtagcttcatgttgccgagcatcccgcaggacatctcgttctcaaatggttaatagagcaagataaaaagatgaaagacaatggaagagaaggtaaggcgtgtggcttttgtgtgtgtgtgttacatgaaatttctgcatttctggactttatgctggccatttaggtccaggtgggatttgccaagtatgtagaaatgcctgtgaataggtaatgattaaatttcaagggctgggctgcagctcaatggtagactgcttgcctatcatgcagtctgaactgtaaaagtggctggaaagggtgacacaacctacagtgctgtggctagcaaggccattagtacagagcagcactgacatctctcactctaaattttaaaataaggacttgagactattttttcctgcatttttagataaagaagcttttaatattcgagaataatatgtagtaaagcaactttttcattactgaaaaagtcgatgtatagttgaaatgagttagacaagctgttaacgtccaagaaatttccaaatgatttttcataataaaaatgccagaaaccctaagacaaggctgttgggctcagggcacatgttttcaagcacaaatgagtatgtctgtctatttggttatgtattgctgtgtgataaatgacctcagagcttaatagtactctgagcagtcatttggggtttagtggagcttgcctctatctaccttccaaggcaaacaaacagtttgggtgttgcccactgttgttacagtagctcattcaccagactgtcagttttagattgtaaccaattgcctcacttcctcttcctagactgcttggatttgcacacatggtagttgttttcttttttaattttttgtttctggcatgtatgtgtgtcctggcacatgtgtggaggtcaggtaaggctagctgacccttgtgcttctagggattcccctgtttcagcctctctcacctaggaacattgaaattacaggagtttataataataatctcctcagcattgcataggttctagaatttgagctcaggttctcaatgttaatgcaggaagcactgtacccactgattcatttctctggccccagtggttggttcttagattgagcatcccaaggaaatgaagcatacgtatgtttatgtctcatgttaatcctcagaagtcatcatatgtaacttctaccatgttctcttggtgtgggcagtgagaccgccctgagtcaacaggagactgagattccacccttaatgggggactgacagcatctagaaatgcacacaatgtaggacatcttgttttgatcaactttggaaaacaggtggccccactggctgattgctgcccctgtctaccatacatatgctatgtggactccatgagtatttttgaattcactattatgcatggtacctacttgggaattttaccttcaacgtgggtcatcctttcctccgtctgcaccaaatctcagtcgttagaatttctcccattgactgagaatgagttgcccagagagggcatggtgaataagatgccaagacttggaaatagagttaaagatgaacagtgtttggggtggaggagtcttgtctatcctgaaactcatggcagtcctcttgcctcagcctttggagctgggaaagaggtataattatttttgatatatggctcttgaaggcatcatagaaagaaattgccatgactaacccagatagatggtcattcttggccactaatgacaaataatggtcattatttgtcccttcgagttaaacgtttttatacaaggggaactgcttttggctacatgtggagtagcactgtcaaacatttacttgctgggcaggtcaaggtcaaatcattaaatattacaaagaaatgtagatgtgaccaaatgagcttattaaaatagcttgtttttcttgtgtaattactgctaaaaatagtttggaatttgcatcagagttaagaaaattggcactattaatagtactaaatctgtactagaattttagttttataggtgaggattatttttaacttttctgttgaaacatttgcaaacttaaaagtattgagatgagggatgggagcatgcgtgttatgctaactatgttccggtctactttacaggttgttttgcaaaaacccttatagagcgggttggcatgaagaacctcaagtcctgggccagcatcaatcgaggtgccattattctttccaggtcggtagatacatcatgcaacacacatgcacacttgtttacctttatttctttttctagaatttattccccataatgtgggattactccatcactcatggttctagacaaatattaaaaagtacatgtatgggctggtgagacaaaggcatttgccaccaaatttgactatcagagttgcatgtccaagacccacagatagaaggagagaaataactcccatgagttgtcctctggtgtatacacacatgctatgacaaacagctttgtgtgctcacacggaaacactaacctgatatgacttaaatttttctttaaaagcaaatgtagctcttgagttctcaaatttaactatttaactatcatcttttgggtgtcaggtcacagaattgtgccatttacgatgttcatagtttcattacatttgtagttttgaccaacacacaattttctcttaatgaatgaataagttgtatgcctctggaaactgtcataaagctctttaagtcaagcctaactttgtagtttttttttttccattgtctttagtgattctgacattgataaaggatttgttaaatgatagaggttgatgtataattggagaccttgcttatagatcactccctggagtaggttatgttgagtttataatgtacaggtcattgcttaaaatattcattttataacatctctatgctgtttgaattggttaccgtttttcttctgctgtgttgctgtcctagtttgcttctcagttataaaacactggtcaaagtcagtctcagaaggaaaggatctatttcatcttacaactcctggatcacagtccatcactgaggaaagtcagggcaaagctcaaggcaggacctggagagagactgtggacaaatgctgcttattagtctgttccagttctacctttggctacctttcttacccagcccaagtctgcctgcctagggatagtacgtgacacaatgtgctgggccctcctccatcaattaacagttaagaaagtgccttatggccagggtgatggaggcaattccttgatgaggtttccttttcccaggtaactctagtttgaatcaagttgacaaattaaccagcacatctactaacaatgtgaaaaccgatactccagcttgaagcatccaccttatttgtggaactccctgtgcagtgtagctgtgtggtttgtaaacattaggttaaaaactggaatgtatgatctggtttactgtttactggtttacaagaattcattttaagtcagtcagtgtctttgaatgtatgggtattacatgcaaatcaggctctgtttttagagaaatgagtttatattccaatggatgttaaaagagtcagaacccattagccgtgacaggaacttttttgtctcgcattcctttaccaggcgtttggaatgttaacacctactgacatgctttcattgtgctcaattaactggaaattccagtggtgccatgaaattaatgtgtaaagtttgctcatggtcagcactcccatgcgtagatctcagacagatccagtgtgtttcttgtggagctctgcctggaactgtatggagacacaggcagtgtgagattccaaacagaagttgaacgtggctttaaatgtagtcatcttatttactggattcttgaatagcatttgtttgccaaaatccctgcctgttaaaatgtgtgttttctttggggaatatttaatgctgtgtttgttgtctgttcaacatagttgttattgagttactgaaagagcattttgggtggaaagaggaaaaagtgttggatgtaggctgagaaataactctgtagagttctctagcatctaagaacataggtcctagacagcctgcctaagcttcaagacctgcctactacatgacttggaaaatcattgagctttcctaggttttcttggttgtaaaacaaaaagttaatgataatcttaaagtcttaaagttgttaagaaagcaaggcatgtagaatgcctttcactgcgtctgtgtttagcacatccttaatagctgctaacttgtactaatattatataccatgtggctgtttagacaaggtgttcagggcactttaccagcatctcttgtcatctcccatgagccataggtgctcccatgagcactgtctggtgctcaccttgctctttgtaggcataatgtaagttactgtgactagggacttttgaaaatgccaagtaatctccttctggagtatgtttcagagatcaacatttaaatgtggtcctaaagaacttgggagggaaaaggaaatttgggcctggtggcctgcagttgagtgcctgtgacttagccttgtttaatggttcagatttatggtttactgagtatcaagctctaccttaaaagcacccctctggaacctgggggcctggctcagtgcctgtgtgggcttagtgtgattggctcagtgactgagtatgggcttagtgtgagtatagctcagtggctgagtatgggtttagcatgagtgtggctcagtgttgagtgtgggcttagagtgagtgtgggctcagtattgagtgtgggcttagtgtttgtgtgggctcagtgttgagtgtggcttagcgtgagtgtggctcagcttggcaccagagtgcagccttgatatgcacacagtcagtggtggactctgtaccaaacatgtgtgagatcctgggttctgttctgcagaccaggaaagcaagtcttagacagacagacagcctgctctgggttgtatggttactgacagaaggcagttctcttgccaaatcagggacgttattaggtaaagcccttcacttccacagcacagtgtctgtcataggtgtagaggtcagtatcaaggtcactaacactcagttttccttccgtggtttgcctgctgcacctgctcactagggtgagttcacctgtggaggcaatgttcctcggccatctttatgcatatggtgctatagtatcaataagtgggtaaggccacacagtcactgcttttgagctgttgcccagataagacagtagcctgctgtctgagccactattctgtcactgaagacacacccctgacccaggcagctaataaaagaagagttttttgtgggggcttgcttacaggttcagagggcaagtccatgaccatcatggcagtagagcagtagttgagagcttacatctgatccataagcagtaggcagaggttaagcaagtctaggtccagtgtgggcttttgaaccccaaagaccataccttctgatccttcccaaacagttccaccaactgggaaccaatcattcaaatatatgagtctatgggggccattctcattcaaaccaccacactgccaaccagccaatcttaaagcaggatgcaagtcagttatgagataatcaaagtcattggagtcttctcagtgacgccacccaagattataaagcgtttccatagttttaggatgcagacttactggctctcattcatttgaattttaagtttttcagctacattatttgtttgtttggtgggtgtgggtatctgccacagcacacatgtactggtcagggaacaagttgtgggagtctgttctcctgccatatggattccagagatggaacttaggtcatcagacttggtaaaaaagcaggtgctgacacacctgctgactcatctcactggccttcatctgatgaatttggaatagaaagaaagaaagaaagaaagaaagaaagaaagaaatctatgtaatacactgtacatagctaagaagatgatagaacaatgacttggttacactgtccatatgggtggagtagcaggttcagggcttttatgtcatttaattttgtcaactcttttcctttctctagccttcttcagagctgtgaccaggaagttgtaaacaaagtcaaagctggactgaaaagcctgattccaacgttggaaaaaaacaaaagcaccagcaaaggagtagaaattctgctagaaaagctaactgcataggcgcgctggacaagcaagctggaacctgcttcccacggataagaagggcggatccaccgtactcaaaactggacactctaaacatgtattctttgttaaaggacctatttatataaagttgtttctaaaagacactttttgctttatgccaactttctgacctgtcaggcaagcactgcacagatcgaagtatggcagtgtagcatcagactgatgtgtgcctggatgtgtgcagtgtggttgaatggcttgatttaagaaaggcgccagctgcagactgagaaggctttctggaaaaggtgtactttcaaggactgctatgacaaaagggcatgaaaaagccacatggaatgtatgtgatgggagcagtaaagtgaactgcccctagtggcagcctgtgctggggacagctgcttctctgctgtgcaaactgagttcagtcgtgtttgttttgaaagctgctctggtaagttcagcacgtggagttaggtgatcatggatcattgctaagttcaaggaaagtcttatctctggatttggggcttcagagtacctacctatcttgtgatagggcattctcccttgggacagtccctaaattatagcccttagggtgagtatgagggctagtgtgttaaagtgagaggtttgagtgcaggtaggctgtttggattttaaatgggtggctctcagcagtgaagctagagaaggtctgtagacctcctgggctcaatgtagcaggcttctgcagtacagagccttgtccttccttcaggtgtctggtgtaatgagacctgtaatgaggcctgtaagtagttattccctctggggaattggctgtgccttacctgccctgacttcaaggtcccaggactactaatgtggcttctgggactctcctgccagactatattaaaccctttccaaaggcgtgacacctgtctgctattggttggcttctctgggcagctgagtatggagtgaggcggtaaatggagaaaagagaatttgattttgtttctgtgtatttaatatatcatgatttgggtttgagttctctatagaaaggaccattcagagatgagagatggtggtgctacatgtttcatccttaaaagtgaaaagctaagcatatacgtaattttaaaaggcacttttgtacagcttgtaatagatacagccgtctcccaaacccctaactcgagattcccataatcacttgcattcttagctctggtggattctaaatgtgctttctattatgtatttgaatatatacattttatatacttctgacttcatagtgcagaaaacacatgctataaacttcatcattcctcctctttcctcaccccaatacagctgcatctggtaaaagggttctacataaatcgttgagttgaattgacatactaagctaccattttatttcccctataatagtcactgtcagatttattttcctttacttgagtcttacattcctcttactagatgccctctccccaaagcttcttaccagaatcccttacaacatttctcttaggttgccttaccacctcccctgcagccattttcctcttctgtttgtgtggagtggctccccagggttgtcctggtgtccactcgaggtgctccatcagggtctcccacctcgtgtgggtcacaggtgttcatcactcatccagcatacgcacatttcctctgaggcttatgcacaagagcagtggttgaggacagagtccagcggggaatcttggaagaaaggtggaattgctgtggacggttcctgagaacccagatcttcaatccagctgcctggcagctgtggtcatgaggacagggtgtttggagattgtcttgccactataaggaacgatggcagacatgctgagaatggctgagcaagaggtaaaaagaattgagacctgtcatgatattgagctgctaagtcaaatgaagctgtgctagccttgaactcctaaagacatgggaaagcagacctccattttcattttcattcatttgattgattgtaaattggattccatatccaatatagaaatttgcagctcagtgagctaacctagctcagaatacttactttacacactgcccagcacttgaggtcagtcagcggtcccatctggagagacttctggctttctgtgtgtcctgtagaattacacacctactgccatcatcctgcaccttcatctcctgtggaaagcctggtttctctcatccctacttttacttttactgagtgagtcacagcctctagtaggctgcctgtgaagatatacctgtgaagtcaaatagattgctgggaggtctgaagctctactcttttagacagtttagctggatgtagaattcatacaaatagtctaaagttaatttaatcacataatttggaaacattaatcttgtctgttgtgtatagagttgcattgtaagtccagtgacatcttgatcttttacaggtataacccttggggtgttaaaagagatggtgaaagagaacgattatagaaaaaattttaacgtcctctgtcttcatcccaggatcatatgcataggtgtaccatgtgtattccttgcgtttaaatgagaaaagccaaatccttcattctggaaggtgtattgtgtctagcacccaccctccttttgatgtttcttatccttaaatagctcagaaacaccccacctggctgagcatcccccaggtgcggatgctattttggactgccttttcttgttttatttctttgactttgtgagttactttcttggccctcccttccagtgaaatgtcttcttatttctaggatatatgtctgtggctctcggggattctatatttatggtagatacttttgttttactttgctttgccacttttctgattccttctctgtctggtctctattagaggctttcttctttctgcatgcactctgcatgtggcccctgtgagcaatggggtgggtggtatcctgcttcactccagatgtcagtgtctgggctttttgtgtggaaccctgctgtgcttcctggggagctgggtcttccacctgtagccagcaccagattacccagcactgcaggttttcaaggaccagtctttttttttgtttgtttttgtttttgttttttcgaagcagggtttctttgtgtaactttggagcctatcctggcactcgctctggagaccaggctggcctcgaactcacagctatctgcctgcctcccgagtgctgggattaaaggcgtgctccaccaacgcccaccaacgcccggctcaaggacaagtcttaatctcagtagttgctctccctctcatacctcctagtattgagcagttggagcaaaatctagtccacagagtctagggtagggaaggagtggataacatttgagccggtccctgtttactttgtcctgtggggctataccatgcctcttagttctgtattatgtgtggaagggatagagatgatgtactagtttgtaaacagttttcaaatggctttctttaagtacaaaaaccatagacctggcttcctaaaagactaatttcccatggataagcataaagattttgagagtttctataatcagaaaactccgctgatcgtagtcacatcacacatcaagtccttgcttcttccggcagacagacattgcccacaggaagcggcctgcccagtttttcaattccagtgtttgtgcagtgggagaagggactcagaggacatggcttttttgtttgtttgtttgtttgtttgattttgggttttcaagacaggctctctctatgtagctctggctgttttgaaactcaactatgtaggctgggcattggtggtgcatgcctttaatcccagcactcgggaggcagaggcaggtggatctctgtgagttcaaggccagcctggtctccagagtgagtgccaggataggctccaaagcctgtctcgaaaaaccaaaaaaaaaaaaaaagagagagagagagagaaaagaaactcactatgtagaccaggctgggcctcaaacttaggagggggattcagcagacatacagtatggaaacgaggtaatgagccacgtggcagaatgtagattaatataaatgagttaatttaagttataaaagctagttgggaaataagcctaagctaaaggcaaagctttcataataataagtccctgtcattatttgggagctgctggtccaaagaaagtccagttacagccaattacactgaactaagcaataacttctgccacttagagctggcagtgtgactctgtagcagagaacttgcctagcatgcaggaggccatgagttccattacctgctgcatgcagcccaagaaagaaaagtcaaagcacagccaactctgagttgtgatgttgcttagccaaggagacaggtcataccatgctctccttcagtcctttccaaatttgagacaccaccaaagtgccccaaatcccttagcctatgttgtagagaacaagaaaccctgagtggattgttgacatgagtgtgtccatgtcagtgatcccagtgtctcagccccatgggagtggtaaacctttccctggagattagttaaacctgcctcctttttcagctgttatgcaataaccccaccttcctgttcacctgtatgtaagaatcagcttctccatcagagaaccgtgtccacctgatcccagcttttctgcgtgtcttttttgaattcccttgccaccccagtcaggtttccaggacctagccacacagagcaaagtgtgcactgtgtctgaatgaattctacagattttcacaagtcacctcacccaggagatgcagtgtgcgatttatgggcagtgcaaggttgctgctgtgcattcgttagcctgcaaacagtgccatgcctatgactgtactccaaacagtgccctccaaggtatcgctgatgcctcttctctgaaggctgtcaaagaatggtgctttggactcttcctgaaaaggaaaatgtctcactcacactattttactcaactggtaagcgtgcttgtaagcccgtagatggatagagctgcaaagatgtgggaataaagacattttggactgcgttgtgttcttaatttcatcttggaagaacaagattgtctcttagctcctcaagtgttgactgcttgggtgggaggtgatagcgggctgctaaggtcatgagaatcatctgactttgtgttattaatgtctacaattaatcataatgaataatttagatattttaaatcacttccagatgcttgaaaacagactctccttttaaatagagcttgtcttgcacttaatgctcatattcctagccctgtctatgcatctgccagtgaatacagatgatgtgatgttgcttcatcggcagcaggccatgatgggacacaaggccagcgtcacaataggaatgtgttctctgggaagcatttggcagatcagccattctgccatttttatttcagtatctaaaccaagaaacatgggcctgctggaagttacagccctcaggacacatgtgtttacctgtctggcaccttgccagcagctgagttgatgatcatcttgaggggaaagaggaggcccactccaaacccaggaattgtgaccccaggtccccaaaatcataattggttctttgaggaacagtgattaattaatagcatgcagtcagaatcgagaccatttgagttctgcagcttctgtgagaaaatggtgaaagatgctctctttcttggctgagctgcttgcactggtatggccgcactctgtcacttccattctgcacacgttaaaattgcaccttaacagatcctttcagtttgcctcttaacagggatgcattggttggaaggtggcttctttttctctctcggtgatagtgtaagataacagactcctgggcttacagtgtgttaagtaaggcacagtattctgcccttgcctgtcttctctgcaggagtctggtttgcttttctgtagtagcttttcagtccttgaaatctttattgctggaccttcctaggggttagcaaggtgagaaaacatatcttctgaaatgtatttgtacacaggtcacacccctttggaagatggaagccaggcaaagtgggaggcagtaaaggatattgtctggcagagaactccagcctggaatgactgatgtggcacctagctttgcactttggttgactgtcaggggttttgcacatcttcagcttgttttctcactgatgagatgaagataatgcatacctccccacatctttgtgaagatgaaatgagtttgcatataaaacacctaggaatggacctagcccaatcaggagtgattctctagccaatcaggggtcggtcctcaggcctgggttcctacaccagctagaaactatttagatagtttagaaactattcaaaaggcctagggacaactctaaaatctgtgacttgcaatgaactctctagcctttgggggcagaacattcttgcctttctgcctatcttccctacacacaggattccctggagctgggcattcactgcttcagctattgtctagggtaagagcagatctgcaatcccctccagtcattctgcctcctggtgaggaagcctgagggaaatcatctgagcccaaatagaatccttttgaaatgcaaataaccctgatggaaatagcaccttgagctgttgcctgtcataacacctacctgtgaagtctatcaactccattatgtcgatggcttagagcaaggcaggttagaaagggaggctgtttccatggggaaaaggaagggggtaaaatgaggtcatttctaggctccctaggtgtaggtacagcagagaagtggggccttcctgttgccttgtagtcttggcctccaggggtcaagtttgagtcagtgccaagaggcaagacaggctagcctccaggtggtgtttttgtggcagaaataccttgaattttggagaagtggctactatagggatctgccaactagccaccaggtgatcttgatcttcagtttcttcatttataaaggacagcacctgcgttaaattatccacttagtggacagccgagttgctgaatgtaagcaagccctccacccccaacaggtctgtcttcagaagtactgtgtggccctgattctggccaggaatgtgggcaaaggttgatctccagagccctccactcttctccaagtgaaggtaggagtccctgaagatctcaggttgctgtgccaggctcacagaggctgtctgtagaaagatgcctgtggaacattaggtggtcagaagttcctagacttgttttggacccacatgacagttataggttacagatttaaaagaaagatgggggaaaagaggcaaaaaacaaaacctctaccgtctggcaaaaggaatcagaattgatccattcaagcatactagaacaatgtccacagggcatcagtctttctaagggagacatagctatttgaaaagtggaggctaatgtggtgtgtagaattgcaaacactagctacccagtagcacaggaaacccctgtgatgagttggcctctagaatttacccatgttgatctaaatttgccatcttattctaggacttatctgcttgcgtgtgtgtatgcgtgccattttaatctgctatatctttccttgagcttactatacctcctacttacttttttattgataagttatgtaaatctgtgactcacaatgttcttgtaaggatttttttttcagttatgatgctgtggtttggtgtttctgtggtcggtgctttaggtgtaatcatgttattttgcaaccttcctgttgcaacaaaacctagacatcatctggccctggcaaaaggcaatgcctgattcccgaataagaaaagcagtctaccctctgcgattgtgccatcagcagcagtgcagggatggagatactgtgaagagctgtttccttgcattcagattgcatgtaagaagaaagtgttcaagagtgacattttcagttactgggtgtcttagttattgttctgttgctatgatgaaacaccagaacaaggtagcctaaagaaggaaccttttaattgagggcatcactacagttgtagagggttagtccatgatcaacacagcggaaaacgtggcagcaggcaggcatgcatggagctggagctgaaagctcacttagcatccacaatcactcagcagaaagagggcaagagtggacccggcacgggcttttgaaacttcaaggcccttcaactccatcaaggagtcctaatccttcctaaacagtctgacaactgggaaccaaacattcaaatatatgagcctatgggtgccattcgtcttcagactaccacaccaaggaacattaaagcttcttgctggcttgaaactggttccttgaagttttgtaattgaggaaagcaggagacttctctcattagaagacctaagtcaggaaactttgcccatacacgatttacaatacaattgtttgaatcaagaaaagcagaaagcacataacatgcagggaacatttgtttcaagactaaagtggggggaaattgatattctatgaaaatgagggacaacttaaaatatctctctcgagaagctgcttaaggcaaagaccagagaagcacagtcaaaaaaagacatgtagtcccagcaagtggggaggaataagtttgcagctcatatctaagtcagtcagcaataaaagtgaaagctagaaaagcaagtgtctttgtgcctacatatgtttccttagctctccctgggccattttggatggtttcttttatactcttttctttctttctttctttctttctttctttctttctttctttctttctttcttttttttttggccctgtatactcacatataacctaattctctctattctcatatagtcagctctgcatatgtagattctgccaactgaggatcaaaaatagttttgagactgtatcgtgtggctctggctagcctgtaacttcagatcctcctgcctctacttcccaagtactgagattacagacatgtaccaacagaccctgtttatgtgttgctgaggcacagacccaaggaatatgcaggtgataactggtttccaaatagaaaaagcaagctcctctcctgcatccctggcaaactctttgccaactgagctatgttccccggcctcagaaaaaaatatttttcaatgttttcatacaggacctggagaggtggctcaatcagtaaggtatttgccatacaagcttgagggcccaagttcaaatccccggtatttgtgtaaaaagctgagcgtggcagcatgcaaatcccagtgcttagagaggggaggtgaagacgggatccagggcttgtgagccaggtagccttatcaaatagatgagctccttcctgtgcagcaagaagccccacctcagaaaataaggtggagaaattgagcaagacacccgatagtgacctctggtctccaaccctaccatgaatacctgcgcacaggcatgtagacacatacacgcacagtgtattgaactgtgtattgaatgtgtgtagacttgtttcttgtcacttcgtaagtgattaaaaataattatttgcttaagattttcgttaggtattatgtgttatgtaaatatttggtgggttacttaaaacctacaggaagatgtgcttcagtgagcatgtggactttatcaacatatcctgaggagcccaagggcctatggctatagctgtctagagatagattgtatttctgtttcttggagccagtgttgtccaccggtttccttctctgtctcatgccttccatgtgtatgccaggaactttgctagtggtatgagataagggcagacaggacctgcacgtagcagtggcctccagtgagtgacatggctgagggaaggagtccccttcttcctgggtcacagtgagggagagattttcagatttttttccatacccggcaatacctggtgtaaggcgatcctacttgccctactaataattattagtaaagttacagagagtttactatggggacaaggtaagagacagcttgatgagagtcaagacattgttatggtacagtgtaagatctgtgggtagacaagaattttaggccctctccccaagtgcataagcatgtgacttgggctgagctagtcacactttgtcccccatcagaaggggatcttgagagatatcaggcggttttcagaccagacacttgagccctgatttctgtaagatgcaacagcagccaagtggagcaggttggggcagtgcagattggagtctagagccccttcccccagggctcaaccaagccagcccaattgcatctgctcaatgtgttcagatttggagtcgggcttcttttgtaaccatgctgtggttaggaaacggcaaacggaagttagagaagcactcaccagtatcatctccagtgttccttccagatgaaagggtccccaaatacctgactgcaatgaccttctctgtgtccttggtgctatcagcaggcagtgttgggcacaaagccttaggctggagacacgtttcctatgaagccaactgagccctcctgtgcatggctcagagcccacactccatactccataatagcatgagcatcataatttagcatttctttccaaaagaagggtcctaaattgtacagaactctaggctccacgctgccttgtgctagccctgtgcttcttactatgcaggcatttttacagacctgtctagaaatgtattagaatgttctagccatttagagagtgggtgggaggagctttgcatactcaattgtattaagtgatggttaagtcaatgatgttcttggtaaggagatgtattgtaaagtgtcaggtgggacttcctcttcatctcgtctatcgcagtggtgtagcattgatgctaagaatgcatttttgaggatgaccttcctgctttcaacccatctctattgctttctattcgtggacatgggttgtgctagttagttttcaccaacttgaaacaaagtcacctgtgaaaagggtacctcagttgtgggatagcctccatcagtctggcttgtcaacatatctgtgagacattttttaaattgctaactctcttagttagagttactattggccgtgatgaaaccatgaccaaagatacttggggtggaaagggtttatttggcttatatagcaagtcacagtccattcagggaagacaaggcagaaactcaaaccaggggtggggcaggggacagaagctggaggcaggacctgatgcagaggccatggaggaccacttcttgttggcttcctcagcctgctttcttatagcatctaagaccactaggccagagaggcatcactgggactgagccacaccaattgctataagcttgcctacagcccagtcttatgaaggcattttctcagttgaggttcccttctctcagatgattctagcttgtgtcaagttgacataaaactagtcagcatactagctaatgtggcagggcccaaaccagacctctgtgggctgtaccagccttagtcagatgggcctgggctatataagaaaagtggctgagtgagccagaaagcagtattcctgcatggtctctgtttgagttcctgcctccatgtttccgcttgagttcctgctctgacttccctccatgatggagtgtgatgtgttgttcctgcaagttggtttttgtcagagttttatcatggtaacaaaaaaagcaaaccaagatacaccttaacaacctcttcagggccacttttctcacctataaaatgaataacaattcccccttagaactgtgaagaagaaccaggataccatggcataataaatttagaatagtctgcatgcataggttgtccacataggttcactttccttatcgccattgttggatgactggttacaacagaaacaactggtttactctctcaaaacctcggaaacgggccctcaatttttttcctttttctttttttgtggttgtatgatttgtatgtgtgtatatatgtttttttcaagtgtgatatatgtatgtgggggtggccacatatgtatgcacgtggaggcccatcactcttgcaacttcattcattgaagtagggtctctcaataaagcctagagctcattaatatggctagtcttgttagccagcttgttctggtgatcctatctttgccttctgagatcagaattatagttaggctaccaaacccagatagcatttatgtgggttctggagatccagagtggtctagcaaatgctttgactcctgggctgtggttatatagctagcacagtaccctgcctgcccccccccaacacacacacacagcacaaccaccaccaccaccactatcttttttcttttcctttttataaccttgatcttgaactgggtagtcaggtatccagccaacagtcattccagtttttttcacagaaaagaatcttggttttgctgttatttcagtttttatgttttgacacaaagtcacgctaaaggagggagaacattctgcattctattcccttaggtccagctgtgatcactggactccaacagctagctgtcctagtgaacctatggacaaggttcatacctggcagtgaaaatggcggcagcttcttggttctttgggactttccttggatggcctccttctcagtttcttatgtagtggttcttaaatccatggaaaactcactcattaaaaagagttctatatcctacccaaaaagtttccaactgcacagatttggtttgaagtctaaggcttgatatttctaacaagttatggcactagtgaaagctgaggctatgtgataggaagtaacgtctcccttgcataagccactgctgttcggggcactctgttattactgacattttatagctcactttttaattttttaaatttatttattatgtttacaacattctgcttccatgtatacttgcactccagaagagggcaccagatctcataacggatggctgtgagccaccatgtggttgctgggaattgaactcaggacctctggaagagcagccagtgctcttaacctctgagccatctctccagcccctaatagctcactcttttgttttttgttgttatgagtttaaaacacacacacacacacacacacacacacacacacacacacacacacacacacagcaaaatgggtaaaaatgttcctcaaagtgaaccagaaagccaagagaaattgcaaattgagttgctgccctctgcagtattcactcatcaaatgtatgcggaggaccatggatgtgctaggggtatataaagatgacccagacaggcacttggtgtctagcggatattcacaggagtgcatgtcaatcatactggcaaccagtgtgcttgttccttttctctttttgtgatgaaatacctgactatagcaaatgaagaaaagaaagctttatcatggctcagtttgataggttagtccaccacagaagtgacgatggggtggtgaggacagctctagatgtggaggcaagagtgtaatgatgcagctggtccccatgcctctgtaatcaggaaacagggatgccgtagccgagctgaattctcctttcccctttgttttcgatccagaaccccagtccatagaatggtgctgcccacactcaggggagtcttctcaggtaaacctctctggaaacacacacacacacacacacacacacacacacacacacacacacacacacacacacacacacacacacacacacacacacacacacacagagtctcccaagcgattctaaacccagtcaagctgatggtgaagactgggcatcatagagagcacctgaacctgaaagagggtaatgaaaaaaagccagtgccttccccatcactccatctgcaaactgggtgagtcctgggatttaaggggatcacagagtcctcttaatgcaggagtagccaatcccagctgcaccttgaagtcatctaaagagcttagcctatttatcagggattcttgggtaattgcctagggtaaggatctggtacttggaatattaaaataccattgatgaatgtgctgtgactttcaaggttgaaaaccaatggtctagccctccagagagattgggtagctgaattcaaagttcctggcttagagttagaggcagctctgctgtgctgtgagtattctttagatgcctggatgctcctcagacctgcccatggccaggtgcaggctaatgctccctcaacaggcagttccatgataatgtgttcccagtttgctaacaacttgctgcagctcatcagtttccttaacaagattttccttggtgacagagaaacagatcatttcaattagcattagataatgaatttaaatggcattgcagtaattccaaaatatcgcttaactgtcctaaataacatcatgcaggcagcactcccgtgggatttattgctgagaaatatccatggcaagaacatagttctttaaagactctttacttgagattattttcccctgaacagactgtcaggctagaactatgctgtagggccttgcattttggctgtgcgaatatctgctcatttgtctgtccctgagtagacagagtttggttcctatctcctgaggaacccccatcaattcacaaagccctttctcccactcagctgagagctcccctgtgccttccacctccattcccagttctctgatcctccatgctaagggaatatttaggagagcgccatactggatttgaaaagatggcatctcagaatgaatatactactgtcatcaggtctgggactaaaggaaccaggagaataatgtgttaaacttgtggccctggaggatttttacaagtcattcctctacacaacatggctgtgaaattggttgtgaattctttgtttgttttttgagacacagtctctctacatagccctggttatcctggaaccactatatagaccagggtggcctcaaactcagagagatatcctctgcctcctgagtgctgggattaaagacatgcgccaccatacccagcttgttgtcaatatttttgatttgcctttctcaaggaaggccaaggaatatgttggccaccatcaagctactagaccatgagcatgcctatgctggctagtttttatgtcaacgtgacacaggctagagccatctgagaaggcagaacttcagttaagaaaatgtctctgtaagatcaggctgcagacaagccttttgggtgttttcttagtgactaatgtgggaaggtcaaggccatcattgtaggtgatgctaccactgggttctgtaagaaagcaggctgagaaagccagtaaacagcactccatggcctctgcatcaacctccgcctccaggttcttgccttaaattccttttacctcctttgatgatgccttgtgatttggaaatgtaagtaaaccctctcctctccacattgctttgggtcatggtgtttcatcacagcaatagacatcttgactaaaacaatgccctcttgttattatggtgttaatgtctcaggccacattctgatttagaaagaggggctctgaagaattgatatggtggtgtatgcccatgatctcaacacttgggaggcagaggaaagagaattgatgtaagtttgagactaacctgagcaacataatgagttccaggctagccaaagatatataacaccctcccaccccaccaaaaaatataaaaggttttgccttctcttcctagctgaccttgccttcctgtgcacaggctggtcatcactagacttagctattctgtgataatataggtcagtaacatgacaagcacacatcaactaattagcttttctcagttaagtagactaaatgaacttgagggtcctagtctctgagattcaggatacaattcctgacttattggcatggtttgaggacagcctcattagctttctctgggtgatttaaagtctcatgtgaagtatagtatgaagaactggacactataatccaggagtggttaaatagaccacagctgttacatttcttaacttggtatcctgcccattaatgccatcatcccagaatgatacttgtttgactgagttagaatcccttggtctttttttacagagtaagtacaccttgcctttggtttcccagcatccatattcctttcctgtgataacagcatcatgacttgccttgatcaaccttttcaccaccctgatttctctgtacccagagggagaatgtaatggaagcttctgtagaaactgttgaagaggataggctctttgtccagcaaattgcaatacagatatgataaaaagctttgagatactattgcatgcagccaatgcaaaggaagacaaaatagaggagagagggtggggagagacagggatacccaagtctatatggcatcatttgagccccaacccgttgatgcttgaagttagatttaactttcagttttcagtttgtcaaaaaataaaatcagaaaaagtttgcttcatgcaccaagaaaaaacacatagcaccatccaggagagtgggacccagagactgtaagaaacttagtgtggccatgacagcctggctgatgaagcaacaatgacaatgcatgttatttcttgtcatgactgatgattaaaacttacatgcctttccaggcaactgtactctgtgagtttccatgttcacttctgattgactgagaattttaagtttcatgctggtctgggaaaccccgagttttgctggtggatggagcttgcctttctgaggaagggggctgttttcagttttggttagatgaccatggatgtttgtggtaagggctattcagactatggcctccagaaagttcactagctgccccactttggtcattctctcaggtgagttaaacatgaccgtggtagtcagtgttgctcttattcctcttattttctggctcagttttcatgggttccatcccataagttagtggcctctaacaaacatgtaagcctctttacagaatgcaactcaaggatgattctaaatatgactaataggagggtaatatcaagggtgagacataccccaagtcaaggctctccacatttgaaacttattgaccaggtcaactaattgtcctttctcgggtagaatacatgggcatgactgtccaggtctcaggttcgtgactacagtctctgatttactgatagaaaaaccactttgttctccaataagggcacatagctcctcctcattaagcagttgatttttttaaaagaatgctcctgttgatatacagcttagtcttatttcattagtgtttcataaagaaagaacttttttaaagtgattgttaaagagcttaaatatattggtaagtgacttccccccccaacttaaaaattagttgaaggagaaatgccctaggaaaactcaaatgttcaaagtatttgagtcgaaaaactttgtgtcattattatgtggagtggggagcacagtattaataataatgttaagggggctgaagagatggctcagcagttaagagcactgactgcttttcggagaacctaggttcaattcccagtgcccacttgacagctcgcagtggtctgtaattctagttccagagaaccacacaccctcacccagacatgcatgcaggtagaacagcaattcacattgagagagagagagagagagagagagagagagagagagagagagagagagagagagagagagagagagagagagaggaactgcagaaaaggaaggaaagagaaagaaagaggaaggaagaagaagagaaagaagaatgaaagaaagaatagtgtttaggtggagaccagccccagccccacccatcaggaatataccatggttatttcctgcatgttgacacctgaacgttggcactttgaatgaccatagtttaaatcaaattaagacacttaagaatttgatgatggactccaagtgtcattagtctgtcactgtaattctcaagagacttaagtaaccaggagaaggccagtgagattgttttacaaagattttgtgaaattgtttttagtaaagggctccttgtgttgtgttttttcaacacaggagagatttttgaatgctgattttaaattggtttatagataagaaaaactgggcactcagggtcgtctgacccctttacgtctgaggcatcattgtagttccatatgaagcatcacttgtttaggaaaatttgggggcaatatccattcttccctgaaatacacaaattttggttgcaactacatcatggcctcaacagtgcacgactactttggaaaactgaagtttcccttgggaagtttatggctacttaaaggcaattgttgcagtaattgatttagtcaattcctgagcccaagaaacaaatctcagcatcaggatagacattctgaaaaattgaaggactttcagatcctgatggaaagttaggaaaaaattatatttactaaaaaaaaactatgagacattgctgccctagtatcaactgtattgttgaccccccttccccaagtaatagcaaatatatgtgctcatttgtttctaaagggatgctaaaaactagaactaagtcttctattgcagaccatttggctcagcttgtgcctttgccactaggatcttagcataagatgggaatttttggagtaacatgggctggggagatgactcagctattccaatcagttggtgagctctcaaaaaaatattctggggagcattagatgaagacgtattaccttctggcctcagtgttcatatacacctacacacacacacacacacacacacacacacacactcactccccacataccccacattagttcttggaataatagttttgctttcaactctaaggtctcttgcaaatttccattcttgtccaggtttttgttttgtttggatttttgtttttaatgggcacagtagagaacaccattacagactggtacaaggtacaaaatccttgttactccagtcttctctagaggggattcttgtatatcttaggttttaagagaatcctttatgcaatgtcctttctttttgtaacaaaaacaaaacaaaacaagtgtcttcatccaaagagacataatctaaaagtcatttaaagttagggcaaatgggctgggaggtgactgagtggttaaagtgtttgttcacaaaaatatgaggaccagtgttcagctccccaggacccatgtaaatactgaatggaaatgacgacacacctgcatttctagtgtgcagaaggtggagtcatggatctccagtgtaaactgctaggcagattagattagtgcaaactctggcttagttgagagaccctgactcaaggaagaggtgaagagtgatggaagaagactcctgagttcaaccttgggcctccacatgtgtgtgggtacatacgtacacctgaattcgtatacacacttgttcctacatacacaaatacatatgtgaaccctgcaccacacacactcacacaggagaaagaaaaattagagcaaatatcttggaacagttgtaaatacaaagtcattcatttgcttgacactggttcctcttctgtcctaatgtcctctcagaatgttctgctaaatgctgtaattctatcaggagtcacttcccattctaacagatatttcttgaatcaattgcttatctctgtatgtagtccattaacaaaatggaatggcaaggccacttcatcagatcagccaataagaccacagtgctgttgaaatattttttctaggtatatatgatagcacacagcagattgtgtgtgtgtttgaagactgaattgtgtatttattcttcaagaaaaaagctaagaatgttctcaagatttactttcctatttttctagctctaagtcatccatccttggagacatgtttcataggattgctataaagtctagagggaccattccagtctaaatccaagactatcacatagacagattgatagaattggggattcttgcagcagcttagacacaaagaacttccaaattgcccatacctttagtttgtttgttttttcaagtctgaaaaacacttcacattggctcaaaatttgtcttgagaccagtgttccaattctgcttatgctggtaccgcaagttcattaccttaccttaaatggcatctgttgtgaataagttcacaaggaagagaaataatcaacaggactaatgtattcaaaatagtcaggcaatggaagtaaacagaggcgaataagggagggcccccactgactccagtctgattttagccttgaatttattagcacattgttaaaattcatacagggagaattggagtgtaattcttttagaaacctttatgtgtcaattaaataatgcatcccatggtttggggagattttataacatctttcctcaaagcacttctaataataagtattttatctaaggtagacatccccaaagtgccccaacaattctaaattaccctcaatgaagctcattaaagataatttctcaaaaacacaaaattccatgttttagtttttagattgcagctggcccccaaaccttagcacaaccgataccaggacagaagcccatttgagccttggaacccagcatgtaggccacaacaccaaccaaaaaggaacagagatctagtccacctgccaaagttccccttcttgctaactgttctaggttagctgaagtgtgtcaacccatgatgtggttttgtgcttaagaagtcaggaacagtaaggctttgggcaagttcccagtgcaacctttggctataaagactttctattggctttaagagtccatgtgttctctgaaggagttatcgcacaagaaaatatgtaagcagctgagtaccagatgatgctcaaactataactccaagcagcaacgaagaagtaagcacaatggactctgtgggtctcctggctttgtagattccctggcttgctggtgtaaccctcctgtgacacaaaactagaccagacttactgtaatactgggaaagtggctcactgggaagacataaaaaggaggaggatgtcttttaggcaaatttggagagcatgtctaatctccacccagaccctactttggcccaatccctttaagtgactaggtacactatgataaacagggaaagaaaaatctatggagtctttcccatctcaatcatgttcagtagacagacaatcccgtcttcaactgtggtggtttgaatgagaatggcccttgtaggctcatacgttttatacttggcccccccgttggtggagctgtttgggaaggattagaaggtatgtcaggggggtgggtggggctttgatattttaaaagacttgcactgtctagtattcctttctctacttcctacttgccagtcaaggtataacttctcagatgtttttgctgccatgcttttgctcaggcatcatggacactaaccctctgaagctgcaaacccagttaaacactttcttttctaagttgccttgctcatggtgttttatcacagcaatagaaaagtaactaataatcaaccagcttaactcattatgctatccttaccttatcattcaattgtgaggctttttaatatttaatattttaattgtgtgtgtgtgtgtgtgtgtgtgtgtgtgtgtgtgtatgtgtgtgtgtgtgtgcttgagcgtgtgaatgcaggcatcactggagtgatgccgtgggtaccatatgggttctgggaactgaactcaggtccttgcaagagcaatacatgcttttaactgtagagccatctcttcagccgtggttaactgtggtgttgactgcttttttaagagcctttaaaggggatcatgagaagaaataccctaagaaggaatgccagtccaccataattggagaggaaaaagctgtcatctaaccccaaaggatatatcatccacctctgaagtcattaaagcttctgaaaataaaccaacatctttcactgctgttcactctcgagtgagcccattcctgagtggtttggaatgtactttagctttgctaaataaacctctgcttaaatattctctctctccctctacttcacccctcccccggctgaattctttcctctaggaaaacaaaaaccaagagccctttacctggcagcaatatgacaggacagatgctaatccagaaaattccaaattccaaagagctagacactcagcttacagtaggtaggacccagcttatacagctggaaggatgaagggcattgctctttgccatgcctgactacttgaaatgcacattccttttagggtagcactactgcctaagcttgttgaagctgactggctcagcattttaaggtcatgctgacccgggaagccttgaatcttgtttgtggttacagcttgcaattcagggagataagaatagtttttaacttttggctgggtgacaatggatgtttattcttgggtagttcaataacagtctttagaaaaaaaaaagtttaacattagcaagtttcatggaggaacaaattgctggggtagggtgctgcttgctttaactcacctcaagagtcctaactaaccttctggttttctatgcagtggtgtgcttgtaagtgtttgctggtccattctctttgggaggggaaagggaaatacctgatgtgtcatgctttcctattttgtagtctaaacattcccactgtgagcacacaagctatgctctgaaaatgttgccatcagctttcaccatgcagattcaggacactgcttccccccccccaacccccgccccaagaccaagccaaaatcatcaactatggacccttcctctgatagcaacttggcatgagtaactcaaccaatactgtttggggaagtccaacatgttctacagttagctgtttatacttccagccaacttatttccctttgtcagcataaaagaatgtccaaatgagcagagggtgagagactttggagaactcagtcctaagtgggatgtctttagcaaaacctcctatcaaggctcggagatctatatggaagaggaggaggaaagactgtaagagccagaggtggtggatgacgccaaggagtagcatcttctagacacaacagggttgatccacatatgaactcatcgggactgtgacggcatgcacaaaacttgcccaagttcaaaccagacaaaatcccagcactgagaagggtaaatggacataaagtcccagccctaacaagaaacaatttgcagttgatatcttgggcaaaagggaaaattggttttctccaatggagtgtcactgggtgtaccaaccactgtccagtacaggctccatgcccaggagtagttgactaacattaaatgaattccattttgtacgtgtgcttttgttttgttttggtgtcttccttccttccttccttccttccttccttccttccttccttccttcccttccttctttccttccctccctgctatggtttttatccctgttttgttttttgtttgtttcattacattgagaaagaacatgaatcttatgggtagggaggtgggcaggatctgagaggagctgggggagggagaaatatgatcaacatatattgtatggaaaaattaataaaaaacatatgaggatgcccattcaccgtgttgaacaaaaaatgagacaactctaccttaccatggctgattttttaggaatccatgctggcttctaaagatcgctttccattctgaatgacaaaaccaccagctaaaccctccaggctagagtttgatctgtgcagcaatggtttcactactttttgaatctattctattccttttattccactggaaactcgaatgggcctctatccagtctttgttagcatctcctccttccaccctctgcccctccctctttgaggtccagtctggcctcaaactgagatcctcctgcttcagcgtctcaggtagtagtaacacatactacaatatgtatgtgttagtgcatccaccagtctgccaactgtatcaactattctgcacatacatagtgggaaagatcagaaacaactagagttatgagtttgtagaatcttaccattttcatctgtataatgttgccaatatctgattttccccaacagattctcaatttccaatgtttctagagacctgctctacttaaagaaattagagttctttcctaaccttccttcagccttcagatcgattccaccataaataatattttctgtagctatttgatatacacatactgctgcagagataatatatttcctctccccgcctcctttgccaaattttcatccctgttagcctctttaacactgtgggtttccaactaggacggcaccctcctaacattaactatgactctttttcctctctgggatttcttctgaaggactcgactctccaataggtcatattttccatgggtttctcctcccaccatgagtccttgctaaggctgtggtcctctccttgagcttgttgtgatcatgtatggacatgcacaatgagaataggctccaagaccttgactactaatagcttacccattaaaaattatttcatccagtgtttatactctctttctatcaatatctgccctccccccactctggagagggtctcactgtgtaggctctgattggtctggatcttgacatgtagaccagctatgaactcacagatccatttgcctcaacctctcctctggagtgctgggcttaaaggcttgtaccatcatgctcaggcaatcatttttctttctttgcttttattcatctgtctgaggacctcttaggtttagtgagtgtacttgcctccatctctagtgacatgccttgtccttgactgagacttggaagtctgtaagctttgacatacccctgatacctcaaatcctgttcttgggcatcatccacacagctagctcttcattccccaaatcattatttcagctgtccttcgggacagaatatgaaaataaaagcaagtttctagtctgtcaagccaggaagccacatggccccaccattcaaaagggagtcattgttcttgggttctggtcctacctttgttatttgctgactctatgaccttggtcaagccactttaaccctcttgcctttcttggtgtaatggccattttcctgctgatgggtattcctctgtcccttctccatcctctccccctgcccccattctgtgacccacacaatttattttaattaatgtcatgaatgactcttttatgaataaattagatcatcatatttctcctcaagaccgtgaagtgactctccgtttcatcaccaatagaaaatcaaagccctaatattatttacataatgatattcatatgcaatcaatgacttaaattgcttttatttttttcttaagctcgtacatacgttggaaaacaggcagaggacaaagcagagcctgccatcttccagttgtggcccagagtgacagaaatcacccacgtatctgtgaaaacttaacaccaggacacaccactgctcaagctcacaatcagttctagagtgcctcgcctggcacatcaggaggtgccaaggcaagtatgaagggtcagtgaaaggtaaacatgaagagtagaagcctgaagtctaccagagggcaggggaggcagcacctccctaggtcacactaattcctcagggcagcaaaccctgagacagctgatcttcccagaatgcacagcgcctttgccaacagcagaggcacgctctggaaaatgcttgtgtaggtcatttttcccatcgggctgcgcaatgaggctatatacctgctcctgagtggtagtcagacatggtggccaagcatccagaatctccagcattgatgtgcacatgccaaggtcctgtcctggctgctccaacctgtccatcactgcagacaccatctgtgaatccaaggcactcagggccttgtctagagctttaggcactttgagctgaactgtgtcagttcatggtcacagctgtctgcaccttagaagccactgcaccaacatgggacatatgagcaaactcctcagttttctgtttcactttgacctgctcagccttggagtccttctctgccctcttggctagctttttcaccatggacttcaacaggactaggggatagtccatggccagtcgggcagcagaggtgggtggcacaggataccaccattgacattttaaaagtagaaaatgtttgcaaatatggagagggaaaaggaaccacaaacataacaaacacattaacacacctttttagctcttggccacacatatatccatatcttggaaatgaatttcagcagtactgtaaaaagactttttctaggcaatttccgtctgccatcagattggcattatcagggctctgtggattgctaccaaataaccaatgtaaggatccttagtgaccctgacaccagatgatggctggacctggctcttggtctttggtggctgctgccgttgctgcagattctccctggcttgataactctggcatctgacagacacacagccaagggaccccaggagaccttatcactctaaccctcactctaacctttaataccctgtggaaccgcaatgcttagacttcacagcacatgttccctggaggcatcctcccctggggactcagtgcaggcagcagccatcagaaagacagggcttgtgttctctttccagacaaggccagctccacctcattaactcaaacagctttcatcctctctccctctttctcagcacaaactcactcctgcaacttctgaattaaatgcatacatacatacatacatacaaacatacatacatacatacatagatacatacacatacatacatacatacatatatacatacatacatacatagatacatacacatacatacatatatacatacatacatacatacacacacatacatatatacatacatacatatatacatacatatatacatacatacatatatacatacatacatacatatatacatacatacatacatacacatatacatacatacatacacacacacatacaaacatacatacaaacatacatacatacatacatacatacatacatacatacatacacatacatacatacaaacaaacatacatacaaacagggtttgcttgaatcttctcataattcttgatttggatcctgaaatagcacaattataaattacccacttagtcaagagattcaaatatactaacatcaagaaaagcattataaaaatatcttttcatcttatctaagtcacaaagagtagtaaagagaagttaagattgcaaaatcaaaatctcctgtcttacataaacagatatacacgaagtaaacctagcagctggtcccctgcagggcagtttgagaaacaagacaaaagaaaagcttcagagggactccagcttgcaagaccaacccctgttcagggagacatgaccttggccatgtcaggaaagttcctgcctggtctggcagctttgtaaagtgtgactcataatcctgtcaccatccagtggctcaatatttttagagagaagagagggggatgggcttgagagccagactcccagggcccagtcagaacccagaatggcaatttactggtttgagtcaggtgtgtgtaacttccaagcagatcgaagtggaggttttgtctctaggtaatgtcatccggagtctgctgagcaccagatgctatggctacagcagtgaacaagacaaactggggcttgcccctacatgcttaatatctgttcattttgtctctgtagggaagccacacacacagtcaatttatgatcagaaagttgtcttgggagcctgaaaccaaaagcagcattacattacagaaaggtacgcagcattagagacctagcttagtggctcccagcttggcagttcatgaagttaggcctgctcaaatgtggggccgtgggtctagcctggcaatggtaactaatgtggggggatttcaggtcttttttttttctcccttgtgtggtactggggattaaactagggtctcatacatgctaaacacatgctctgcacagagttacatcttcggcgttcagacttctttttctcacctgtctctggatctccctgtcactgtccttgtccgtctccctcttcttcccattcaaaaaattaaagtaattgtaaagaatagggccaggtatggtggtacatgcttacaattctagcactcagtaggtagaggcaggatgtttgcgtttaaggcctgaatgatctgtaaagtgagcatcaggacagctagagctgtggagtgagtccctgcctcaacaaaaggaaacacgctgaaatgaaaataaatttggtttaaaaactgtaaataataagatgttgatgaccaccaacactccttccacctggatttccaatgcttaccatcttaactcatatatttccaggtatttttctcttttaaaggaaaatcctttttttaaaaaagtaaacaatgaagcatgcttgcaatgaagaatgcaaataattaagagtagcgcagaggtcaatgcttacagaatatgaatcccagaaatagtcattactaatattagttgaacttctatttatttatttattttagatagtcttattttgagcacagactggcttcaaatttgcatgtatccatggtagtcttgaatttaaagatcctcctgcctcagcctcctaaaagctgagattgtcacactatactcagcttggtcaaacacttccttacaaacacattcaatgtgaagacaaggtaggtagattgaatggcaacaatatttttactttttaaaaatgcatcctgttctatgtaatttttttaaatgaaaaatactaaaagtctgtctaaattagcagacaaatagaaataggtaaaaataaagcaataattagacttcagattaagtctatctagaagaaaaagataatttaagtttaaaaagtagttgtgagaaacattgacatcagcggtatatatataatgattttatttatgacgttttctctctctctctctctctctctctctctctctctctctctctctctctctccacacacacacaatgcattttgatcccaggcatcacctttacccactgccccttcagagggttttgtaagtgatgtcagttgcctttatgttacggaccacggcatttgaatacacatttgcctttccccttcccagatctctcatttttattacatttgcttctctgtgtgttcatgtttgtacacacagatgtacatacatgtatttactgactagtactgtagattttgttgtcacatgtcaaactactccattctgtctataacccttattcccattattattagcttgctactgactgaatttgtcccggcctttagtcttgttttgtgtcttcactcctgagttctttcttttaaattctttgtagatgagctggatgctgattgcagattcctatatatcagcactgtacttaatgaaccttcccatggattgaaggacacacttcatgtctttaaatgtgacttagtctcctgactgggtacgatgtcaccaagtcacactccctttccctttgtaaaacagcttccctgtcttctagtattaccatcgtgctgtagagaagtctggagcctcgctaagtttcagttctgaaggagcttgttttctgcctgcatgttaagcttttaattttcaatggttaagtagtctatattccaaaatttccttgcttctgccttgccccattgatctgaagattgtcttatatatttatgtgttttgtatgtcttctgctctctctatatggaattttccagtttaaggagccacttgtggcactgtttggttgcctgtatgtcatcagtctgtctcactgatgtagtagctgcctatcgccactgagattatcctgtcttccctgctatttccagtgttgtctgcttgcttcttttccacttccttatgtctatagtcggagtggctcctaatatgtttgcggtctcactccctgccctatcatctgtcttttcaccttgtttatctaactgatagagccgcatttggaggcccttctacaggaataactgtcctgtcctctttagacagggtgacggagggactgccctatttgtgttgccagacttgttcctcatcctttctgcaaatggatctgcatttttaaaaacagtttaaagttatggggatatgcccctttaaaacatgtcatttgatattttgctttccatggttataatttacattaactgtacaaattgatagggtcaactgtgacttttctgtccatgcacatatcatgtgttagttctgctcctccacccttctcccactcttgactcccttctgccttcccctcagcaccctttccagcccttaaatcctcctcttaatctccttctgccccatgtcccatctctggagaccgctgtttcaccccatttctgggggaggtggcttgtaatgatgtttgcctttctgtgtttcccttgcttcacccgctatgatgctctccagttctatttacaatgctgttttttctttgctctgggggtcctgacaagaacccccccccagccaggaggttacatttctgtcttctccattcaggatgctatatcccattctggaggctgggaagaacaggaatgagatgccaccagtagaacctatttcttggttcgataaagtatcactttattgtaggagggtgaggggataggtcatggaaatattttattacttttaaaattatgtggaggtgtgtacatctgcgtatggttatgtgtatgtgagtggcggggactagagaggccagatgcataagatcccctggaaccagagttacagagatagtcctgagctgccatgggagttctaggaactaaactcaagtcctctggaagagcagcaagtatctctccagccccttaactctgttctaaagatgttcttttctagtgtcctcatctttgagatctacatttttttgtgtttgggaactggaggagactatcatggtttttcttcatctgaaatagttcttcctcatctctttgtctctcccccccccccatttccctccctgccctcttgcattgcaggggatcagatcaagccccttggcttccacatgctaggcaagtgatctgagtttcatatcaacagtttgctatgcttgacaaggggagaacagagaccagttgctttagaatgcgcatgaacttgaagttgcctgataaaatacagactttacagtttgagcaacaatagcacagaagtcctttggtgtcttaaatgacacttgtttttaattttcctgatgttggttgatgataattttgaccacttaattaaggaatgtctgccaccaatagttcaaagccacttctttctttttttttgaattagtaatctgtgggggcaggaggtctgggcctgtatacatgttatgtttatcatgaaaacatttgctcactcatttcagcaatgatttaggattttctactaccactgtttggcaggatttacgccttcatttacacataacatttataatagtcccttcagaatgtcttcttggaaaatcctctttgatctgtctcttttgcctgctgggactaaggccagttctccacaccttggagaaggactggtgctggagattttaggaatggaataaaattcttcatccagagtttcaaactaagatcctgaatgctgtagctatagtttactttttattttcatctctgtagactgaagctaggaccccttgtacatggtaagcacactccctgcttctcatcgctatcgattcaaaaagactgttttgttttttcccccaaacagcatagaagtcgtcttcttcttcttcttcttcttcttcttcttcttcttcttcttcttcttcttcttcttcttcttcttcttcttcttcttcttctcttcctcttcctcttcctcctcctcctcctcccacctgtttcaaaatcttggttttgaaaagaagcacattcatacaacaaagacatctgttcaatgatgttcatagcagcactatttgtaatagccagaaactggaagcagcctagatgcccatcaacccaagaatggatagagaaaatgtggttcatttacacaatggagtactactcagtggaaacaaacaatggaatcttgaaatttgcaggaaaatggatggaactagaagaaaccattctgagcaaggtaacccaataacaaaaagacaaacatgatatgtactcattcatatgtggattttagacataaagtaaaggattaccagcctacaattcatactgccagagatgctaataaacaaggaggaacctaagagggtcccctggagaaggggaaatggtcaagatctgctgagcaaattgagagcacgggaagaggagggagggagctatgagaatgagaagggaagaagaggaaggatgcagaggtcatgagggagcagaaaggttgagtcaggggaagaatagaagaaagggtatgtgataggtagggttttagttggggggtggtaggggaggacgggagggagaagggaactgggattgtcatgtaaaataatcttgtttctaattcaaataaaaaaatgataaaaaaaccccaaaatcttgcttttggcaattacaaggaattttaccttgatgtcataattcagtgaaggattaccaatgtataaaaaatctgttgggaaatagcttatttgtttgatgtcaagggatcatgcctccgatatcatacaaatttcaaagcagagtataccatttcaaaagaaacttttagccaagtaaaactagtatccctcatttccgggatgactagacattgaatatctgctagcacaatgctcttgcactatattgaaggtttacatcacatatgatataccttttgccaaagatatttaatctgcatctcatctccagattcaatttccaacttatgaaaaacacatgggagactgaagtaggagttatgggtaaagtgtgaatgtctacataggctaatgtgcttgaacacttggtcccagctggggacattgctttgggaacctgtttcagaatctcaggtccttggggcctgtatgggcagcacaaagtgtgtgtgtgtgtgtgtgtgtgtgtgtgtgtgtgtgtgtgtgtgtgtgtgtgtgtgatgtttgtatgtttaaagagaatacaaagttggatgggaagggaaggagatggatctgggatgatctgaggagagaggtgaatatgagcaaaacacattatacaaaattctcaaaagaaaaaagaagggtgtgcagaatatgatttggttactcccatgatgttcataccactattggaccagtgggcatgcctgctcaggccagttgttattgttactccctgtgttcacagctggataaggttgattactttcattatccagtagtgcacttaacacatttttgtggcatgaaaggcagccaggagggatgtaacttctagatcagtagcagcttgatatcttcatagtctatgacttaagtttatggtgtcttcagcaatagagttttacaagttctggaggacaagcagtaacaaatagcctgtgatgttgagcggtgcatcaaacctcactggccaataggaaaactgttgctctgctaggaggtaccccccattttaactctttgtatatttgtgtgtgtatgcatttgtgtatacaaatatataaatataatcatctactatacatacatatatgtagtaggtaggttttcatgtgactttttaagatcttttgtttatcttgtgtttatcccccccccatttctttctctatcttactctcccatctcccaccacaatttaaccctctctgttctattattcccttttaaatattaatacactgtgttctgtgtccttaagagccatttcctcaagagaatctatatatgcttcaagcttctagagtaaaagcagtggttgctttccgcttatgttggtctgctgatgatcctacaataaaacaaaaacaaaacaaaacaaaaagatgctacaataaaacaatacagcttccaggtttaaactacagacatctcacatctttaatggtcagaaatttaagatcaacgtgtcttagttagggtgtcaattgctgtgataaacatcatgaccaaagcaacttgggaaggaaagggtttgttctatcttaaactctcaggtcacactccatcactgaagaagtcaagataggaacctggagacaggaactgaagcagacctggagtagtgagtgttgattacatggctttgtcagtttgctttcttataccctccagcactacctgacaaagtggaccaggccctcccagatcaatcattaatcaagaaaatgtactgcagacttgcctacaagcaaaccttttgtttgtttgtttttgtttttcaagagagggtttcccagccaggcgttggtggcgcatgacttttatcccagcactcgggaggcagaagcaggtggatctctgtgagttcgaggccagcctggtctacagagcgagtttcaggacagactctaaagcaatacagagaaatcctgtcccaaaaaaccaccaccaccaacaacaaaatgctgggctaaggctctccaggtgcaaaaacattaacagccatttaaaatggcagctcagggagcccagtccataagagaacctattttatgaatgacactagacatatcaaaggtaaatttattcaaaactgagcaaactacaagtatgttcatttttctttagttggttcatgtgatagaaaagctaccatctaattagactttaggttcaggtcctatgacagggtctccaggcttacagggaaatgttatcatgatgattaatctttgttgttaactcgatgcattaagaaatgcctagaaaactggcaaagcacatttctgggcatgactgtgagggtgtttccagaggaggttggcatctgagtaagtgaactaggtgaagacccactctgagttgggtggtaggatccaaaaagtctagagaaaatgggaaatccaaagcataaagggaaagcctgtgtcaacacataccaagccctctcttgagtagatgctactttcaccatccctgatcatttggaaagcagagcccacattcctcaggctttgaatgtgggctttcaccagccactaagatttccctggccctcggcttccaactgcagctgtttcaggggccttcttgttctgagatttctacttcttagaccaagattccccagttctccaacaagcagccaggcactgtagggccatttagccttagatgttataaacaactctaatacatcctcttataattatgtacatatcttactggttttgctcctctggagaactgtgactaacagagttgctagtttatgagttgaaatattaacatcatggtacagatgcttagatctgtttcatctatcaaagtccccacccagccacccatacatacttagtgattagttttatcatgatggttaatgttctagctaggttaggttaaaagcctggacttattggaattttaaaataagaagtatctggccatggtgatgcacactgataatcccagcattcagctgggtgagtcgtggattgagagttcgaggctggcctggtttacatagcaggatcctgccaaagcaaggaatcattcaaggaaaccatttcccttctgactttatttgactgttgagtattccctatagcagtttgtgttagacctgcattcctggtaaaggttctctgtaaatgactgatgctctcactcacatagttcaaacaggccatcttccttcatagctgtctcctttctctttgtgtgtgtgtgtgtgtgtgtgtgtgtgtgtgtgtgtgtgtgtgtctacattgctaaactgcctttactttctttgaagggaaaattttttatttatttcccttcaggaaggccatctttgttttcttgccataaaaatgtttggtgagagaagctttacaaatacctgctaatgagcataaaaccacaatatctacagggcagtaataatctactgttttcctcaaacaaattcctagacttcgattatgaattgctacatcctacaagattctctgtatgattgcacattagtcgaagacctcttagaatgggataactttgaagattcctctaaataccttgcattgtatttaaagaaagctcagggcaagggagatggttcaatggccaaaggcacttgcttgagtctgatgcttggaatccacacaaagcgggaaggagagaaccagttccacaaagttgttccctgacctccacatccatgctgtggcatgtgtgtgccctcaaacacacatcctacatacataagcaaacacattcccacaataaaataaaaaagatgtttaaaatatttttgcctatatgaaagttttttctttctttctttttatttacacatttcttcccagcatattttaactgtatagattcaaaatctacaaggagaaatttgtataccaaggttatggcacagaatgaaatgaattgtgtactgtctgttattgaatgagataaatttcacattacctggtttttcacatgtacattcattatagtaacacatgcactttattaacatattcagactcctatacatatacatagggtacttagataaggatatgcatcccatccattgcatttgggaacaaagagcctatatttggcgccagacagccatagtccagagagcatgcccctggaacccagtgtttgggtcctgtagaaataaatctaatagtttgtgtcctccatttactccagcaggaggtaaacatgcagaactgaaattatgtgtcctggagggcaatcttgccctggagtgcactcacttcagctgccacttctcagccttgtcccacccttgaaagactttaacaggaacaaaagtcccctgcccacccccactcccccattctctgaactttccactcagggaagacacattcttattctctgcttgtttttcctggagttcccaggactcagaacctccaggagggtcgaaccaggaataaaacccatacagaaagtagactttaagatgtcccatgattgtcacttacaggtgactgtcccatgtgacacactctcagcttaatcaagtctcacttctggtcaccaagagcctaattaagcaaaacctgttgagtgagtttagccagaacctcctacccttgatgcttgatcaccctccatagctgaccaaattcttcccctactacctccagatgaggtctgagcaagaatcctgttgggtcggtttagccagaatctctccttaactctgatgagtatgtcagtgactttccacttactcttccttgctataaatgtcccattttctttatttagagttgagcccctcttctctccctactacaaaactccatcataatatagtacatgcccatctccatagtgtaatggcttcttgactataagctactggacccttctgtcttttgttttttgttattgtttgttgttgacacagtgtctcactgtataatgtaggctgacctagagcttactatgtagtttgccttggaactcctggcaatcctcctgtctcagcttcttgagtgctgaaattatacatgagtcaccacgtcccattccagacagcctctgaccaagtgtttcagataactatttgttgaacgaatgggctatggggattatccaggcaggcttaatctaatctcaagagccctataagagcaaccagtggcagaagtcaggaagatccaagatataagaaagtttgacacatagcacttctccactgcaggacctgagaggagtaagaacaaagacccttcgctgctacaactgcaaagaactgcattttccaaggaacttgtgagccccaaaggaagcagttgatgcaagcaagttctccaggtaagacttagataatcataactgcctcaggagtgagatcccaagcagctaatccaaccacaccccccaggcttcacatctgcacaactgtgagataagcaggagttgaaagctgctgagtttgttcagtgatcgaagcatttgttggagtgtttaggaattatccccatatactaggcatcctcacaggctggcaggacgctggtccttctgcatgccttgtgagggtggagtggtttagaggggtgaaggaatgtgagataaactctcacctctgctaatcacaaccacgctaccactgctgagggggtgccaggaggcaggcattgtaactggatgtttgcctctggtacttgctttgattctcagtggtcacaagctatggatggtttccttatttaacatttgaagaaatggtgacctaataaggcaagtgagtggtaggaggcagtggtgcagagattcagttcagttgtgtgacccccatggctctgtgcatttgttggcagggctgttatagccagtaccacgggctgaatggcttaaacaacagaaagctgtctctcaattctggagcagcaagtcctagatgatgttgagaggggggctggatgcttctggagacagcaagagtaggatgtttctctgattctctctaacttcttggaacttgctaataatcattgctattccttggtccatagacatgtcacctgatctcctgccttcattgtcacttgtcatatgtctgcataccctgggggaaaattcttgtttccatatgagcacaggtttgtggggttagggcaatactaacaacctcattttacttggatcaccttccaagaccctttccccattgagtcatattcacagacttggagagtaagaactcctgtgtttgagcagggacacattacaacccatcatgagcctccaactgtggttcttatgtaaaggcaagagatacatagctctttgaagctgtgcattgccttgctcctttaatccctgacttggagattcgtatcaacacctaagccctggagaaggatgaaaggggacctgtgctttcttctcttggcttttcaggtctcctgtctcctatcactctgccccaggcccacaggctgtcctggctgcttctgatcctacagaaagggagttgtcaaatgctcctgagaggtcaccctgtgatggcctttgtggtcccagtcctacctctgctatgcagagctgtggacagagtggcttctggttgcctgtagactgggatagcttcagggtagatggtgcttcccaggaggaaagtggaatctggacccaggtcagaagtcagacaaacattaatgacatcatttgaccttcctggaggagggcctgttaagaggatacactatcatttgttctctctctcctgccagccaggctataaatatgctaataaggactttacgtataattcatatatcattctcattgtccaaactttatgcgtgcaccatgttttgcagtttgtaaagcactttctcatacgaccattgctaagagagcaatttccttccgttttgtaggtggacaagttgacctgtttaaagtcacctggtatgtgatgtagattgtattacttttgcactgctggctgagacacagcaccggaagaggtaacttattcaagcccatagtttcagagggttttcagtccatcctggcagggaagggaggtagagtgtctctctgagtaatggtgagtgttcatgtggtcatagactagaaggcacagaaagcaggctggaactaggggaaggcacaaatgactggccctaaattacaaggagttgaagagactgcaagggtttgaaatttggaagctagtgaattaggaagttgatggtgaatggaagcatgtggtgcagaaggcaccagaagacagacgacctcaacccagctacccacagtggcgaggcagcttcactgcaggcaactgtcgctgcatgataccaaaggggcgactgacctccagagatagccaggtagagggtgacattgattctgtagctgtctcaccatgttttggaatgggtggcctgccacattgaaccaaaaagggggtggggtaaaaatgcttgcatatatataacgtagcatggtggtattgaccttctggccacagaaacagccactaacttgacaggcctgaggtagaagctaagatttgtactttctagtaacacgacccccatacacctctagttccttctccccaccaccccccgcagggccatggcctacatcccaggcttgcactcctcctgccttagcctcacaaatgctggggtcacatgtgtgtgtcccatgtagctcagttcctcacattgccaagtcttcccccagagtgctatataggtgtctgtcacgtctttgtggaacccaggcctcccttcccttcttctcatggcgttcagcacctttcctcaggcttgggctacacatatgccagtgtcactgcagactcctgtctcttgctttcctgttgagcaagaacctaaagctgggtccccagactgccaaaggcccaaggagcaactctgatccagagcaaagggtgactggtggttggtgtagaaatctcttgataaaactcgttttgtgagtttttgagtctcttccaacaaagaggaagtcaagcttacagcttgttatattttctttcccatgattcctttcaagagccctattacctggtatggttttctcatcatatttatgagcaaatggaggcccaccggtgttaaataaccagcccttggtaccatggtaagaagaaaagatggagtttgaccttctacatggaatctaagccagagactgtggctctcacagtagcaagcacctagcatgctagactgtcttctaaataccaggaagacattgtctaatagtgagaaatgagtctcattgggccaccagatgacttgacaaacaggctcagcaaggttaaatgtcctgcctaaggacagcagcatagaactggtaggactcaagaggagcttgaaagggccatgaaaggcttttcttcctctagtcttccccaaggcagagagggaatatccagaatttggtacttcagagactttttccctagtgcctcagagccatttatcattggctctgttgagatgtatccagggcaacatgtgtctcctaccttccacacacagctttgtcactgccatctgccctgaggccagcatgaccatctcaccacctcttcttcatgcttgtaccagccacttgaaaagcccgggactactgtgctcactgagtcccagactctcattcccatatccccctaacaacaattccttatatttcacacaccttacaaccctggaacacaatgtcaatcatctgtgagcacacctgtatttcttcccttgccatttcaagatgaatggtctcactacctgtctgtattagttctaaaagaaggcattactggatgggacaaaccttcattttgtggagctattctttgccttgtaggacatgtagcatctttagaccacttgtctggtaaggacctgatgtgttccctagtgaaatgtccctaacttttcctggctccccactgtgacccttcctctcctgtatcttgtagtcctctctggtaattataatattctatccagatgctcctacctactcagcctggagtaaagtaggcatcttcctaacgccttatcactgtttccacatcattgtgtgtccacccttcctaacagttccaagccaagctgaaaggcaagttatcaggttctccctccctgtctcagtcttctactgatctccacatactccctctaactccttgtagagtatgagctggttctttgtgaccctcaccagcaccagtcctctgtaatacttagggattatcatgtctatcaaggtacagttgcaataccctttatctctaaccttatctttgatgctgttgtcttttaccttattttagatacccattctcagtctgagattgtaccagtcaggggtaataaccaatcaagttagtttcaaaagtcctagtttttgatcatcccttttatttcttccagttcattccctgtaacctctgaatttcagtaattctgagtgtaccaggatctttttttaaactttcccacaccctcacattgctcctggatatactgggtccacgaggtcactccaggatggaataaatctctttggagaggtaggggcagggctttgtcatgtaactaactggcctggagctcatggccctcctcctgccttaaccacagatatactgggattatgatttatgaagcataactggctacaaatcttcctttccatgggttgctctctggctgggaatgctcataccctccacagggtatttgcacttggtatttttctcttgcccccaggcatctgcagggttagttcctgtggtggtttgaatagattgaacatggattcatgtttgagtgattggctcatagggagtggcactattagaaagtgtggccttgttggagtagttgtggtcttgttagaagaaatgtgtcactttgggggcaggttttgaggtctcatatgctcaagctacatgaagtgtggcatacagtcttctgctacctgtggatcaagatgtagaactcttagttccttctccagcaccatgtctgcctgtactatgacatacttcttgccatgacagtaattgactaaacccctgagccagccccaatgaaatgtttccctttataagagttgccatggtcatggtgtctcttcacagcaatagagactctaactaagagagttcttcttccagtcaccagtcacagaaaagcccactctgattatttcattaaaacttgtgatctaccccaacttgttacttctttttttgctattgtgcttattactgatatgctatacatttcccttaatatttattcctcaaggatggaaggattggcacttgcatggctatcagtaagaacttgttgtatgatagccaagtgctaagattgtgttttgaacacaggtcagctggatttctcactactccatgtcatctcaaggtgtaccgcagatatgaatcacatctgtatacattgagtttgaggttttcctggggaattattggggtacaggaaagaaattatataaaatgactttgacagtgtatttgtgattccaaatatggaccgattgaacttttaaaagcagatgaaatctgcatgaagtgctgatgaaatgaagacacagcatccatttcattgctactctgttccttttcttcctcccccatcttaatctttcactctttcccctcttctatgtattttttttattctaccctccctcttatcctctctacttcccattttactctttgcactcttctgacccccttttttcctctccttagctttctcaaagaacaaagcaaattatgttttggaaagaattttaatttccaaggcataggaaaaatgaaattgtcccctctcctgagtttcccttgagcatctgtactttaatgaaataaatggcctggaggaaactgggatgtgtgggggtcaggtgataggtccattgtgcctgggttctccccctccttctgtttggaatctgtgtctctaggggatgaattgggccaggaaacttggcactaactccttgtcccgtgctacttatgaaataattgacaggtgagctcagagaccttgaagaaaatggaggaagaaggaaaaacttctcagtactgaattataaaactggtacacaaacatgactctcttcttgaatgccaagtttgattttcaagaggtgttggttcagggaaccggattttcctctctcaataaattgatctaaaacagcagtaggtgatagaaccagggggccagttttgatgtttcatgttgaactaccagattctggtagtatttgttgagctgctctagaggtggtatgaaaatgccatgacttgggtttaggtcacacttaggttcagccttggggcatatgtttgcctctggaaacttgggtatactacgtgacttctttgcgccttagtttccatttctgccaagtgcagacaacagtatcttcctcactgagctgttctaagaactgcatcatatcaatgacaatgatgcatgagaatgatgctgaccgtgaatggatcttgttggtaactgtatgttacatgtgttgttaaatgtactcactggtggacaatgtagaaaaatgcttattatacgatgagcactggacaccttaccatatagtttttgctcataaatagatgtgtcagggacaaatactgggactggataaactagcagggggctcattcctagacaatgtattattacccttcccttggcagccactgggtgcctggagttcttcatctagggttggggctttgtgaaatgtcttccatccccattggcatgttgattattgtggttattaggcaggtctggtttaggcaaccatattatttagatttcatgtgtagcatcccagtcatgtctggaagacactatcccacagtagccttttaagccgcattatcacctagcactatgtaagagactaagaactggagaacatgaacatgtagaacatagaaatatatcaggtcatttctctgttgtgacacagagtttcacctaccccaaatgtacaaagacaacatcacgatgtatcaagatgcagaatggagggctcgacaagatggtttaggctatcactgcagaaagaaatgacttccaagtcttagtgcttttccaagccagaaagttttctcacgtacattgcatgtgtagcagaggtcagcatgggtttttattcatctagttcatcagagccctctgctgatggctcttccataatggcttctgtcctcacactcaaaacctagataagggctggctaagtggccagcttagattgcttgcttagcattccagaaagacctgggttttgtcatttaatgtaaattatattggtaaattgtcatgtgctatatagcttgttgaaagtggactcttgaaacacagaagaccctcctatgtttcctctaaaatccctgtgctgggcaggcttggcctcttgctgtgtaacagggagaggaaaaaacagcaagcaggtaaggatattaaacatattgtgcccttgaaggaaaaccatttctcacacaggctaccatcctttaccccgtagtataaaaatatttgcagtaggaatagggagtggaaagcttatgcaaagctagagaaatcacgcaggaacccagttgactgcttcagcttccctagctgatttctgctggatgtttgcgagacctcaatttgctgttacctttgatttttctctcaatcaggctgtttcagtcttttctgttgaatgttgtaaaattttaatttgatgattttttaaaatatgttgcttctatttatctgtggtggtttgaatagaaatggcccacataggctcatatatttgaatgcctagtcattagggggtggttctacttgacagagattaggaagtgtggccttggaggaagtgtgtcactggggggtgggctttggggtttcaaatgctcaagccaggcccagtggctctctcttcttgctgcctgcccatccagatgtagacttctcagttaccttgtctgcctatgtgctaccatgtttcttactataaggatagtggactaaacctctgaaactataagcaaggccccagttaagcactttcttttatgagagttaccatggtcatagtgtctcttcacagcaatggaacactgactaaaactcattctatctgtctatctatctatctatctatctatctatctatctatctatctatctctatcatctatcatcccctctctataacttgttgtttattcttttacttctaattgttgtatacttagtactcactcaaaccagaagcatggatattacagataattcttctgattatacagaacagatcaccagtgccacgtaaaactggacatggtggtacatacctataatcctaaccttcagaaagtggaggcgggaggatcaggattttaagatcatctttagttacataatgagtttgaggtcagtctaggtcacaagagaccctttcataaaatgaaaatgaactaaaccttcaactagaacaggaggaatgcaatagaaacacagcacttaaattcttctgtgagaagtaatacatggtttttgctcacatttgctggactaaagcaggccacttggccacatatcacttgaatgtgacagggaaatggtatccttcatacacatattctagacagttaaaatatctatgaatggcctagtgactctgaactgtggtggccacaaaagaaggtcacattctggatagagggcctcactgagatcttgcttgtaaaaaacaaacagcaagagctgtggtgaactgggtaacacacacacacacacacacacacacacacacacacacacacacacacagagcagagtctttttatgtatctcagactaacttaaaactcctgactaactaacttaaaacaggagtcttctgtgtcagcctcctgagtgctgggattacaggcatgtgccaccattatccaccttagataggataggtattgtgtcaaataccttcattcatatatcaattaaccccccacagacaccctagaaaggaaggccataattccttattatgatggaaactgatggccattttctaaaacttatatgaatgaaggagagcatgagcataatgcatacagtacttttgaattaataagaaaaccctgcaaaaaaaaaaaaaggaacagggcagtagggagacaacagacttatttctagtccactttcctaatttttaaagtctgagaatatgtcagcaaatacatcctgagacacattcgtatcagttgttagacagtttgtgaaatctttctggttaacaatgtctgacctggatatagccaagggcaacatgcgaaccaagtacccctgctggcatttgtctgcagtgttaccaccagcaaagcaaggcaaacacagctaagagcctggccaagatgatttccggatgccctccaagggtgccagggcttctgttcctagctgcgaatgttccagtgggtcgtatgtgtatcatatattcatgaaactatttgtatgtgtggaatgggcttgacaagcaaacccaacagattgaataactggaagaacaacagcaaaacaaaacaaaacgtgctttgcagagggcatagctggaagcctttgacaggagagctaaatcatttagcactttgaggtgccaatcaccccgttctatcaatcatctgggaactggctgtatctcttggtctctaaagttgaggactgagttttgttgccaggggtgataacctgggagcatgactgtcaacaaacaaacaaacatatgttactggttttgctggcaatttggggaaagcaaactatttttctgaaaatacactgggcacaacaatcaggatttcaactggaaatgatgacatattcaaggagataattgaagtggttttaatagacattctctttacagaggttaggtcaagatgaaaggagccaagcaaaagtagtaagacaagcaacagtaagggatcacttccactcctagcctgaagacagcaggaggaacagggtttgcaggagaccgtgaaggctatcaccaaacagggttggggctgctgagctgaaccagggctgtgaggactcagcttttctcctcccgcctctggtatcttggcagagggcttggaatctggctaggcagacctgaagacagacctctgtggtcacacagctagatgaggtaagagtaagtgatttcagagacatcaccagagaacagggagagaggggagcagtgggctacaggtaccacattcatcttgttctgggttgcacacgtcaccagcatttagaggcccatattatttgaatccattttccttgatttaaaatctttggaattgcatagtttcattgttgttatttgtttgcttttgtcaacgacaaactaaagtctcctttcttgaaaacatgaactttttctcttgaggtagaacaggggcagcagctgtgaactagctagtggtcactgtgtggggtatggctctatgtcttcatctctacagaacggtctttagaatacattggctagggaccttgtgcacagcccaggatggtgaagattcaaaagctaccttcctctggagcagcttttctcaacttgtgcatgacaatccctttgggggtccgcacatcagatatcctgcataaccagatatttatatgacgattcacgagagtagcaaaattacacttatgaagtagtaatgaaaataattttatggttggggtcgccacagcatgaggaactgtattaaagagtcacagcattaggatgggtgagaaccactgctccagagccctctctctggggagtagaggagtcctaaatgaatgtgtgttgtttgacatgagcatgtgcatggccccttgaaggaccccagtgcctcagacccaccagaatggtctttgtgcaaatgttgacagcatgcacaaaaagtttctactgcagcttcctcctggatgtatatagcctgagactgctctctcataaaccttctactgagactagttaaatctgccaccgccttattcaactgtacacagtagtagatgcctccttgttcagtggtatacaacaaatctgtcaccctaattcagatgtgtaaaagaaatgagctgagtttctgggtcactgtccctccatcagagtgctcaggcccacccgatccaagggttctgtacacgtgtctgtccttttcttcattgtctgttgtctgagttaggccaatcactgaaccccacagagcacagctgctctccttgatgatggcggacattagctgcatttgttttcttggacagcaacaaaatagaaataatgctgttgatgaagaggaagaggaagaggaggacctatctttatttaatagataacatgtcctaaagcttgaaatatacacatcatctaatagccatcaaaatcctgaggaaaacaccactatattatttccatgttaacaatgtgggaacaagttgaaactgtaaccacataacgattaggtcataccagatgaaatcaccaatattcagtcatgtttgatgaaaatgtcaacttcatatggttcaactttgtgtgatatattgcagaatcggctttaaaatcaagagcaagctcattgtgactaaacttttgtgagcgaccaatgagacctctataaagcaaccaaagtatcaaataaaataatgttccagtgactggtgcaaagtgacgctcacaaaatgttctttttgtgtgtgtattaatttcattccgcctgtcattcttgctccctgggggaagcagtgcacagctgtctgaacagatgtggccagtgagactgggaggaagtctgctattgactagattctagggacctggaaatttccagctttgttataagcaccactgctcccacccccaagtgcccccactcctgtctttcagggagtttcttctgccttgcaattctaggacagtctttcatgtctagagcagagggaggtgctgtgaacattaggtcttccctggtctttatgccccttgatagtccagaagttttgcttcatcagcaaatgcatccataaagtcaaagggcaggagggctgggggtgggtgaaagggcggctgccttgttgattatattaggtggatatatcagctgacttaattcacaagattacttctggcaaggagactgattgaaaagccctcttctttttagttggcgagcggaaagagccaattccctggtggaagggtgtgctgtttgggtgtgggttttaggacttggaggtgactatatgcctttgaaaaacaacagtcagggctgtcagatttagcaaaggaaaatacccgatttgcagttaaatttaaatgttaggagtatatactatgcaatatttgggatatatttctattaaaaattgttactcggctaaaattcaagtttactccatgttttggtttcaacagctccctctgttagccagctgtgttgtcagtgtggcagtattaagagctcaggtctttagggctgaggaacccatgaggctgctccttcatgagtgatgggatcaaggctgttataagattcttggaggcagtgtaaagtgagcttgccttgtgccatgttagcatacagtcctaagatgcaccaaggagacaccatcttgactcacaactcggcctgcttgtgttttgatcttggacttctaacctgagggaaataaacatattttttatatattgctcagctcacagtattcagttccagccatgcaaaacactcttctaatttgctgctgcaatgaaacaccatgaccaaaagcaacgtggggaggaaagagtagatttcgtcctacatttccaggttgaaattcaccattgagagaaatctgggcaagagtttggagcagaaactgtggtggggaatgatacttgctggctcactctctcttattccctggctcatggtcatctagcttttttctatagcctagacccacctgctagggatggtgttgcagagggctaggccctcaaacaataatcacctgtacgtaccatcacttactgagccagattccctgcaatcatcaatcaagataacctgtcactgacacagccatggtcacagaccactctgatccgagcaatctcacaagtgactctaggttttgtcaagttgtcaataagaactagccagaacagatgtcttgacctcatagatgtaatcttagtacagtgcgcttttgtccacccttcagacactaagtcagaatgtgtggaagtcacatttttagacttccaacagagccttgtgcatcagatgagcctaggcataaagcccagtcccactattttagtggctagatgaatgtacctggatcatctaacctctctaagcttccatttctcctcaaatagaaaagaaccacagcatctagtttagggatgttgtacaggctcaatgaagttacatactgtatgtccactgtcaatagcacaattactcttatttatggtctaggtgggacagtcatactctaagaggacaggggcaaatctctgtgtgctctgctcaaaagagccttcaatgtcaagactttgggttacagtagctctgtggacccagaaaggaattcaaaagaatggtctcaagaaaagaaatgacccaagggcactgactgccaaccctcagtctagagaggcccttcctcagtgctcatcatacatcagttgttgaaaaagcaggtttgctccctgaccccttgtctggaaaacagactgaatggaagtctgagttgtgagagaggacagtggtagctgccttcaagggaggtagaaattcacacctacaggtaccacgtttgggttcccatagtaattctagacagagattcctcaacattggcatccctgacatcttagcactaggggctaccctgtgcattggagggacacctgcagcatcccatgtctctaatctactacatgctgggagcctgccttgccctctttcactatagtgacaatcaagtgtcaatcaatccaaatgtgacctggggagcataaattgcctttggttgtggacattattattattattattattattattattattattatttacattattatgtaaagaacataattagggtagtactcattcagacacattgacccactatcatgtattgagcacttacaaatgttctctcctgtcccaatactcagattaagaggtaggcttgactttgtacatctcacaattggagaggctgagctcagagggttgatgtgagttcccacaaacctctgagctggtagatctgggatcctgactgagaggttggtctgactccaaagcttctacaactcccactgtaacactccattccccagaaaatgaagagcccctcctcctgatttgaactggaaaactcttctccaggcaactcaagtctaaaaatactgagctagatgccatgagaagctgtaagagatatctaagatgttgttcccttggagccatttccagtaccgacgtcatacgtaaacacaatccagtgaaagagcaatgtgaggcattttggatttgggcccaaatagccttcctagaaatagaactctgaactgaatgctttttgtgtgggccagcttcacgtgcccctttgctgccagaggggaccataattttaaaagaagcaatgaagctttgaagttcttgggttctaccagcctttcgtcccagtgaagcattaattctcttgccttatggtgggctgtgtgttgcttccagataaacactgggccatcttctttgtggctctctgcataaagttcacctttccccgctccctacggatggcggtgtactcatacgctttgagcttgctgtagtaatcggagaacttgttgtagaggatggaaatgggcatcccattgagaataatcccgaaagcgatgcagaggaaggcaaaaagcctgcccaggtgggtctctgggtacatgtctccatagcccacagtggaaatgcttacctgtttaaaagaaaagcaggatgaaatggttagccttaagaaggaagaggaagggagagaagcctgcaggaagcctgtcaccctgtatgtgcacaagggaactgttcagcgctcccatggagccagctttcagagttgcctacaggacttgtgctatggaaggaatataagctggagggctgaaagatgggtttaaatcctgactatggcacaccagtgttattatatgcagcacagggaaatatgatcaactttaaagagctgtaggaacaaactttatgtaacaaatgttgaattcctgtcatagaacatgtttagcaactgtctttgtttccacacctcttccaggctgtgttaggacggggggagggggggagtcacccagatttaccttcatcatgaatgtctgagaaaaagcttgaacttagaagcaatcagaacagttcaagtccagattgactcttcccatgttgtagatcttgggacataccttaagatgctgggaccatctctcagagatctagttaagatggactatcaagctacatattaagcagtggtcatggcatcaggcatcctgggcaaggaacactccactgtcccccccctcatcaaaagcagacaattacaacatcgcccagggctgctgtgtagttcaatagttgttttgtttttttttttaaatggagattctttaattgtatgcatccagagaaacacacttatcattgtgttgggaccttcagaagacctcacagaacaagactatgttcacccttcatgaaattcctttcatcattcttgttacactgttttaaatcccactaattggagatttatttaggttaacaagcctattgtttaaaatgcagattcccatgggagtacttatcacttagtaaagccagagaaaaccctggggaagccccctggggactgtttttatgcttcccatgcttctattggtctctagactaagtcactaagagcctctaaagcagggctgttgcttacagtagtaaaaacttcccattggcaactccaggatgcttgctgttcccaggatttgtgtgatggttgtcccaatcttccaacagatggcagtcattatacaaagtcactccctttccacactgagatggcctttggctcagaaatgtaagcatgcttgtgttgatgacgcaagggttagtttgaactttcaaatgtggttgattgattagaatgaaatggagaaatgagccagctgggcaaagctggtggcattgataagagtcacagacccatccagcccacagaaagggaaaggtgtgcctccaaggaagggcaggtcccaaaactcactgctccatctccatcgagagaacttcctgttcccatggtagaagaactcaagcaagcatgcagagacaggatggcatagacagggctaaagaaataaggaacacacttgacttcctgggtccaaacccacttcacagttgtgtgagttttgggcaaagcagctaaattctctctgccttaatttctattttgacatatggagataataatagtacccactttgcaagattgtaacaggcattgaaggtgtctctacccacaggctgtgggagcacttgcctggaggagacctgagggaccttcttaatgctagccccagctgaagggaggctacagaacacttatgaagcatactctccaccaggaaattgacctcttttgtgtctaatagacctacaagctgtagaaataggctccagcagactttggctaaatgctggatgaggagggagatttcagagcaacctttcctgtggctttggtagaggatattctttcctcacactctggatgaaaacacaaggagcagcagagaccaaggtacagttaatctctgcatctgcctgtgtgtctgcatatatgtcttgttcccagccacaccagtcttaaactggaaactgaccatgctacagatttcccctagttttgggactcaagagtgtgacagtcccgtgacagctccctcactagtcagcaagtaataaactgccaaccactgttcagaagagcatcagggtttctggaatatcccacttggatttctctttcagcaggcaatgtttttttccctcctgaagaatggggtatagataaaatgtcttggccgccagtacttcatgcatctaggaagtacaattccagaaaataaagccaattaagaaaataattagtaccccttcagattttcccaaagaggtagagccagtaaaggctgtttttcctcttaaaactatacccaacagtatatgttgtctttcaaaagctacttatccatgctactgttgcaacaaatatatattttttattttgcaactatacctctttaggattatagtctaaagaaacaacttgctgtactcatcctgatcattaatcttgttgtcagttgcctacctcaatactggatgcaatcactctagggacaattcctcaaagtattttgaagtaagaatgagattaacacattgaataataactctcaattagacgttataacgtctaatataacattttaacatgagtgtaagtgatgcagaaaggaggcgggaaatggcccaagctaaggcaaaacgacagatgctagtcaggggtctagcaatctacacacataaaggcagaataaaggtaccctatgcatcttcagcttctttaacacctctccatccctttgatactcagtcaggtcccactgaagtcatcttcaacgagaggaggaacatactttagaaatagaaaaggggcctgttcccaaaacaggagcccctgagacacaaaacaatcagtgtctttgagtggttgcctcatttataactatgtctgaacaagctagaactgcaacactttctgtgccagatatttcaggcagccctgttcagtcccaagcctggtgcccttttctgtaattctacaactgggattctatagcctacatttcccagtttccattacagctgttttttgtttttgtttttgttttttttttttcagagaggagggatgtttggaggactgggagggaggaaggagagagggaggtctctgttgttgactcagatctccaacaccatcgtatggctcagatagctgatgctcccggtcctctcagcatcagccacatggtaccaccttttaaatctgtgcactagctccacatggctctcctctgtaagcccaagtctaatgacactaccttctcccatctattcttcctgttctaaggccagtagttgatctctccatttgctatttttttcttttaccttcctaatgactgtgcatcttttttccttacagcaaacactcaccttggttttcattttcctgactgtaaccactcacttcacatatgggtggtttccaagcaatcaattaaaacaaattgcagtgatctaaagaagatcagctattttcaaggaaataatgctatcatttaggaaaacaaagagggagccggctctgtggtgaggtggggggcacaactatttggtgcctcagcctaagataagtttcctttagaagtgacaagctactaccagagtttcctctttgactcctacaactttaattttttttctggaagaatccaaaggaaatagtttgttgacagttcaactggcgtttttacttgaaaacaagcccactcagaagactgctggttatagcttcatcagaaagctatcatgggtggcccataggatgcatttaccactcgggtaatcttgaaacccccacttagctggcactgctccaggcatggcctgctaatctgtgtactaagaagcttgcccttctgtgtgtctcacattttttcttcccccggtagagaagggatcactcctgttttaatttctaccaaaatgcatctggaatcaaaggttattgcttccatgtgataaagactatcagctagatagatgtggtagcatctctgtattacagacttactacaggctagtatgttacatgtgtttcttattacatttgtgctcacaaataaccagcatttggcagatgctgttctatcttgcatacatgaacaattgcagatgtaagactccataagggatttgttcttatgaggactgcacaatagtgaaaattcttcacaataacaaaagtgaaatattctttttagaaccctgacttgaattgcagagggttgaaagatccttggcatttaagagagggaagatattaaaagcagatcagctgagggcttgttttctaagttctgctaaggaccaaacaatacataggagaaagggttggagaaactgcggttcatgtgaggtacaaaggatacagctctggagtagcataagagtctatcagcatagccagcatctgggaggcagaggcagtgagctctgtgagttcaaggtcatcctggtctatagagtgagttccagatcagccagagttaccctgtgccacaaagacaggggtggggctatctatcatgtttcttcatcttgacatttcaatgtgtgaatgtatgggtataatatatttgagcagtaatatattattacagtagaatgattgtattattagacctaacttactgtatctccctaccatcaaggtattttctctaagtctcacagagctttgttttcctgggctgccctgccctgccctgccccttgcttgagtttggccatgtgacttgctttgggttgagttgatatctataactcaataagttgagcaaataagaacagaagtgatatgatacagtgcttgcatagttaggtctgtagactctctctcctgatatttgccatagccatagagacaggcctgtagaagtatgagggacatataggcctcatcatatcttcatgccatctttaatccagctagaccatcagacatgaagatgagtgtcatcagatgtttaaacagaccagactagttcacacccatccatccatccatccatccatccatccatccatccatctatctatctggacaagatctcactgtgcagtccccgtgggcctggaacttgctatgtagacctgggtggcttcagtctcacagagacctgcctggttttgcctcctaagtgctaggattaaaagcatgtactaccacacatagattaagttgctcacactaaatgaatgcttgatgctttaaattgtcaagtgttggcataggttgtgacacaccattgctatggcagtaagtaacttgtaacttatacatcatttataaacaaacacatgtatatgtattttggtgttgtgttcaagtttttaggaaaaagtgccatagtgaaaagatgccctccccctaccacccaccattcaatgcttagtgtttagagtatgacctggaatactgcaggtcctcagggaggaagatggacttttgtgaattattttccatcctcctactttacaactacatataagaaccaaggcactttgtatctatcattacatggtgttctttcctccttgctctctgataataaaatgcctaagtacataacatgcaagataatcaaagtaccaagaagagctgagtttatagcatcagttctgaggaacgccacagtcccggaataatcaaggaaattgttcctactggatactttacgtttgcccagggagaaaacacaagttgtcagccacttgtgtacttcataatgatgtgtcctgtataaatctcagaacaaactggataaaggtcattggtatggggtaaggttggttgaatggggaggtcagattatatgtgatttggtttacaaaaaccatgtttaataaagataagggctttatactccaaacccctcacaatggttaaaacagtaataggtataaactgtttcaccaatgaagaaaagtgaatggagatttaacttttgttgtaaaatttctttttaaaaatcaccacttcttaataaaatgaattccttaacaaaagagaaaaatattcactttgcattaatcagtaaaggaaactaagtgatcaatgagcaataacttcagaaatattttaaaggtaaaattcagtattaatgggtctaaccaaagtatttatattagtatatattaatataacacaaatattgtgcgttaaaagtagttgaaagtcccatagtaatgttgcctatataccatagacttttaaaatctttggctgaatgaaaatttgactttaaaacgttgtattctggggcaggagagctcttccaaagaacccaagttcaattcccagcacccacatggcagctcacaactgtctgtaattccagttccaaggaatccaacaccctcatgcaggcaaaccaatgtacataaaataaaataaaattttaaaaaagcctttgtactatgttgtcagcatgtggatttgctgtttgcattcccactttagtcacctccaaagtaaatgtcatttgctggggacaaatcatcccccaagaactccatctgtacacatggtttatctactatggagatgacctttcgtcactgggaatatgatcagagcagcagcttttgacaagcttgttcagacaaacctagcagtaccctgtcactgaggcaagttcagcttatttccagcttgaagggaaggaagactcattgaactgcagggaacttcaagtccaacttcctcttccagagatgaggaaagtgaatgctacaggatgatacctcacaatcaactacccagaaccatgggtaattgttgggctagtagaggctagccccttctaagtctcccgtcctgacacagcgctctgtcagtagccttggggttagttttatctcagaattttgcactggactatgtgctgacatcctcaatgttaatgttgtaaatatctgctcttttaatttttgcttaatgtcttcaaaggtattgccatttgctttaaagaagaaagacagaaaagctattcaattcgttttcataccagcaagtttactactccctgatctatggtgacttggttagcatctttcaggcatttatctagcacaccagaaataggcattttaagtaaatagtatgacttactgtaaagagtccagtactcaagacaatgataagaagaactagtattaactagtattaacagtcacattaggcaaggcgtgacaatgacacagtggcagagcagggaaagggcatggaagctagagtcggacacacttacattttatccctgcttttgctacctccagctgtatgcttacaactgtgctgtctggcccccagagacattaaaatgggacagttacactctatcctgaaagaactgtagtgcagctggagggagtttcagttttagatgcatctctccacactgagatttaactagaacaagaggcggtttagttctcaggaccagcattgctcagccaactcataccccataacttacctctcgtgtccttcaaaaactgaagctacttcttacttgtcctcataaaaagaaatggtgacaacaggcatttctttgtgatgcttaagtaaaatcagctttatgaaccatttaggacaccaagagtccaataagtgatgactgggaaatgaggagtcatactttgtccacagaacatgaatcatttttcacttttctgaaattctgtctgccagagatttctgttttgtcaggttttgcttttgttattgttcattttcatttgtttttatttttttgagatgaggggctaaagtaacccaagctgacctctagctcacacgtgggccagccatccggccaaggctggcctagaatccctgatcctcctggctccacctcccaagtacagagattagagattcatgcaacacctagccagctcctgtcaagcattttaggatttgaaaattcttaggaccttgtaaaattcagttagtaaacaacaatctcaatgtcgttatatattcaggttttgttggaggcaaccatgtggtgcagaggtgcactcttctttagcaagaccaagaaagatcaagagacaagcctgccaaggctgatgactaagggaagggaggggcagcgtgtgtcattctgggggaaatgataaagaagccccagcatcatgctacttaccgcagcccaccaccaggcatggaggatgctggtgaagttggtgccaggcacatcgtgctctaccgagtacacagctgcagagaaggagaagatgcccatagtgatgaagagcatcaggcagcccacctgctggtagcactggcgcagcgtgaagccaaaggcacgcagcccggtggaatggcgcgccagcttgaggatgcggaagatacgcatgaggcgcataaggcgcagcacctggcccaccttgcccacacgccccaccgtctccaggtcatgttcccgctgggaatccttgccttccctctggtcctcgctcgtgaagcactcgagcagcagctgcaggtagaagggcagaatggccaccaggtccaccaggttgagggcactgcgtgcgaagcctctcaggttgggggtggatgcaaggcgcagcacgaactccagagtgaagaaagccacgcacagcatctctacgtgctccaggatgggcctcgggtccccaccgcctgtaccctcctcggcctgatgctgcatctcctccaccgtgttgagtgccagggccactacggaaatgagcacgaagaggttggaggccacccccatggccttggcggccacagaggaaaagggtttctccatgaggttccagaggcgctgacgctgtggcccgtagaagcgcatgtccctgaagagctcctcggcctcctcggcctgtgcctgtgcgcgcagctccctctggatcttaagctgctcgctcagttcatccctccgttcctcgaagcagatacgacaacagcgtggtgtgtacttgagcctcacgccccagtaacccaactcctccaggaagctacggggacacagctcatctcgcaccagcagcacccctgatatgtagaagttatagatgaggtggaagacggcggggtcacggtcaaagaagtactcatctgtctgtgcctcgtaatcgtcgcacaggcccagctggcggctgcggctggtggaggtgaccaggcggcccagacgcgttttggggtagttggccagctcacaccattccaactggtagctgtggccgcctacgttcactttcagcgtggacagctgggctggcgtgtcagtatggtcatccagcagagctgtggggcactcgggaggctgtttctcctctgcaaggtcatccttccagtcctctccgtcttccccgccatcctcatcttcctcaatgtagtaattgtagttgccctcggtccaaggtggtgtgatgctggcctgagagccagtgcgggctcccagggaacagatgctcctgcggtgttgtttgctcctggcgttggatacctcctcggtctctggaatactccagggaatgtagcccaacgacagcctcctctcgttactctgtttcagcatggctttgggagtctgctcgcttgcctgcctctcctgtctgtctagggtccctggtctgctcactgccggtggaaggacagatagcgtgccctgcactgtctcagagagaccagcctacctggggccccaggcgtgaccctcagggctgttcttcctcctggccggccagatctgaacactagcagcctcgagtactctaatcttgctgatagggaaaaaagcaagtgttagaagggatttggggcctcttagccagttctccccccacccctctgacgtggagggtgattatgaggtcttaaatctccagataatcagaagaaggcagagattattgctaataaaaatgtcggtcagccttgccccggggaaatgcttagggtatgtgtggctgattgaggtaaaaatgaactgaattagctggagcatatggatacccctgtctgcatccttccagttagagatggaagcctctgccctcagaaaagccaccatgaacagtaatgacagcagaaagctgactttgtgactggcccgtttatgaccctttgtttagatcctctacaattcttttccttttattgaaaatggattttttttcacacaatatagtctagtggttcccctccccctactcctcctaattcctccccacctcccttcccatccaaatgcacaccctttctgtctctccttagaaaacaaacaggcatctaaggaatgatagtaaaataaataaaagcgaatcagaatatgacaaaattacctaacaggaaaaggagccaaagaaaaagacctggagataaacatgtttatgcacacaggcatcccacaaaaacacaaaaccagaagccataatagatatgcaaagggcctataaggaaaacaaaaacaaaaacaaaaaagctctgatatattattatgagataatgaacctctaaagatgctattgagacagttttgtatttgtcatctactggatgtggggcctacttctaagaatggtttgtttccccaacgagtctcccttagacaaagctaatttttcatttgcagtcggctatcaattggagacagcttttaggttagggatgaagacatgtgcccactttgttctagggccccatctggtgcagacccatgcaggctctgtgcatgctgtccaagtctctgtgctccagtcttatctagaagacctggattccttggtgttctccatcccctctggctcttacagtctttctacctcctgttctatgaggtccctcaaccccaaggggagggatttgatggagacaaccactttagggctgaatgttctaagatctctcattctctgcatattgtctggctgtggatccctgtatttgttcccatctgctacaggaggaagcttctctgatgatggccaaacaaggcactgatctgtgagtatagcagaatgtcattatgagtcaatttttgctatattcttttagcaaaacagtagtatttggttttcccccaggtccctggcctatctagtctcaggttcttagtcacccaagcagtgttgggtatgggttccatttcacagagtgagctttaacttgaatcaggtattggttggttatttccacaagcttggtgccactattacaaactttctttttatttttgagagttgcatagaagtatgcaatggaatatgatcatatctaaccttcccatttcccttctctttgtctccccaacatgacccctcctaactttgtatcatttttatgtattattattacttactatcttagttattttcccattgctgtgatgaactaccatgaccaaggtaactgacagaagaaagcatttagctgggcttatggttctagaggaagagtacagaataggaggaaggggaagggtgtaggagggcaggggaaaaagctgaagatcacttcttcagtcccttgcatgaaggagagatagagccaactataagtaagagggggctaaatactttcgaatctagcaccccctgcacatatttcttccaacatggctgtacatcctaaatctccccaaacaatgccacaactggtgaccaagtgatggggaatgtactgtgtatgttcatcttattgattgttgaataaagtactgtttggccaatgagacagcaagttagacggacaaggagtcaaagagcattctggaaaatgtagtagaaaagtgttgatccaggcaggaagtgacatagtaaggagactcatagcaaggacaaacacgaagtggccccttttttcccctctgctcttcctccagattcgagatgtgaaccactggcaagggaggactccaatggaaggtttccaataagtcttataaaatatatagatttattatataattaagactgagataagctgggcgttggtggcgcatgcctttaatcccagcacttgggaggcagaggcaggtggatctctgtgagttcgaggccagcctggtctccagagctagtgccaggataggctccaaagctacacagaaaaaaaaaataaagagagataacagatgagaaatcctagtcattggacaagcagtatttgtacataatacaagtctctgtgcattaatttgggccctaacttggccggcagaactcaggtggctggcagagactgcccacatggcagtagggctcgggtggcttttagcggaaagatttatcgtaacaatcaaatgttgcaatatatgagcctgatggggaatgtactgtgtatgtttatcttattaattgttaaataaaatactgtttggccaataaaacagcaagttaggcagaactaggagtcaaagaggattctgagaaatgtagtagataagtgatgatccaggcaggaagtgacatagcaaggagactcatatttaaagaaggaaaaacaggaagcatccctcttttttcctctgctcctgttccagcagcacaatgtgatccactggcaaggagggacataaggtgtccgataagataagtcttataaaatatatagatttatgataattaagactgagctaacagatgaggaatcctagtcattggccaaacagcattgtacctaatacaagtttctgtgtattcatttgggccctaactcaggcaggcgctggggtaaagctcacacggtggggctcaggcagcttttggcagaaagatttattataacatgagcctatggtgtatatttctcactaaaaccaccatacccagtaagtatagttactgttgcctatatgtgcatgggtaggggcaatctcaggtatcatgggaaatgactcagtggatatagcctctaaaaagaatgattctccctccctccatacctgtcactactaatagctcctcagtaagaggcggggcctggagattgtctagccaatcaatggtagagttttgtctagctccatcttatatagatcttgtataggaccatagctgctatgagttcatgatggtgatagctatgccaggtccataagacagcctttccagcactcctcctcagccttccaattttacattcttttcaccttcttttccaagatgttccctgagccttggtggtggtgggattaatatagctgtcccatttagagctgagcacccacgctctccttcttagcactgtgaacagttacgtgtcttgccattgactgtggtcccctgcacaaagcttttctgaccaatgttgagagcatcccaggtctatgggtataaacataaatatttgaaaggcaattcgaaagcatagtcatttagctaaaataacaacagcaggttctactccagagccattgacctgtcctagtcatgggcttttgaccaggatcattgtacaaggcatgaaattcctccctgtggaacaggcctcacatccaatgaaaaaccctgcatactataccaacttgccagacaagatgtactggtacagtagtgcagcatgactgaatgaggtcatagaaacaaaccatagggcctgaagcaactctgttccttccactcacacagttgaatttctccatgtgattctccttaacagctctgcatcagagttaggtctgtaccaccatttcccttcctcactttctttttctctttcccttattaaaatggtggttttcaaccttcccgatacttcgagcctttgatgcggttcctcgtgttgtgatgaccggccaaccataaaattatttcattgctacttcataactgtaattttgctatggttattaatcataatgtaaatatctgtgttttctgatggtcttaggtgacctctgtgaaagggtcatacaatccccaccccccttgacccacacacaggttgagaatcaatgttttaaaagataaggactggtttaaaagataggactgaatgaaagaagtctgtaggccttgttcaaatgtgtcaggtttcattccagggagaggttttcatcacctttcagaacactccagagctgaggtggtagcatgggagggacagaagggtgccgttggaggggctcgtcatttcttgttggtgatgcacataagcaaggatgttggcaaaggagcaagggaacaggtgaggtgcataacaggaagagatttgactttgaattgacttgagaattcatttgttttgataggctaatacatattcatgttaaaacttcaagagataccaaggctaattatagtaggaacagtacattctcccaccacagcctctagctgtcaggttacctccaaagaagcaaaaactgttactattttctgacggttctgccaggaatattttgaacatacaattaaaaaatatacctgcccctctttatcatatgatcagctcaccattaacacaaatcataggacatgatgcactgctgtttttccaggtaaccatatatcttgaaggtgttttaatacattgatataataatttcatttggaaaatgtccactaagtgggatatcccaattagctttggctgtcaacctggcacagcttagagtttcctgaggtgggagtcttaactggatgatctcccagatctgattggcctatggacctgtctttcgggggattgtcttgattattagttgtatgaggacacagcccactatgggtggcaccattccttgggctgcataaaaagctagctaatcatgagcctagaagctagctagctagcaacatcctccatagttcttgttgtactcctttggccatacagtgagatccttgattatagatatagcaagttggcctgctttcaggttcctgcctagacttccctcagtgacaaactgtgacctggaagtataactcaaatatgtcttttcctcccccacattgcttttagttagagtgcttctctacagcaacagaaaggaaactagaacataggacatgataatagacaattagactcttttcttgctttgtgcttagaaacaaaatagagccatgaataactttatatgtatattaatttctacatattcaagatagataagggataaattgttagcaatggaatcattaagtcaaaaattacacacctataactttgattgacagtaccaaattttcctctatcaaagttttcctagattacaactgtccatcaatgaatgaaatttattgtcaccttcggaactccatgttttatatgtacaaatgataatatatctgctagccttgttttgatttcattttgtttttgtagtggtgtggcgctgaatccaagtccttcaatgttggatgagcactccattactgagaggttttgactagttatatatatatctggccactgcctgcagttcgttgcaaacctagttttttttttttttatggacatgattgaacatttacttatgtgatttagagctgttgtatttttttcctgagaactgtcttttcatgtagtttgttccttttgtccattgaattgttggtcattttctgactgattggcaggaatgtttaaggtatcatgaaaatagattgttcacctgcagtctgaactacaaacactttttctagatttatactttggggagattttcccaccaaaaaatatttcattttatgatgatggggaatgtactgtgtatgtttatcttattgattgttaaataaaatactgtttggccaatgagacaagttagatgggactaggagtcaaagaggattctgggaaatgtagtagagaagtggtgatccaggcagaagtgacatagcaagcagactcatatttaaagaaggagaagcaggaagcaggcccctttttcctctccgctcctgctccacggcacaatgtgatccaccggcaaggagggacgccaataaggcgtctgataagataagtcttataaaatatataggtttattatagttaagactgagctaacagatgagaatcctagttattggccaagcagcattgaacctaatacaagtttctgtgtattcatttggaccctaacttgggctggaggctggcataaagctcatacgtggcagtgaggctcagacagcttttggcagaaagatttatcgtaacattatgaactagagggatgactcaggcagtgcggtgcttgcacagcaagcatgaggacctgagttcagagctggccccagaatctgagacttgtctagtctaactgcccccctagaccatggtggctgaagtatcagcccctagtgatttgatatttagaaaacatttgctgatcttcatttattgttccctctaggtttcacagatgcctctgaacaaaaaggtgctctctgacccagactttggaagaacagaaaggagttgcaggaaatgcttttgcctgtgagttttttccctatctcaaaatttgcattcaaaattctactgaggcagagaatatggaagagaataaggaacatctgctctgacgcaggcattgccgtggtgacaggggctccctggagtagggtgatgggagccagatgatgctcccaaggagatttgccgagttaaaaagtggcatctgtgaaacctagtaagaatataaggaatgtgctggaacagatggtatgtgaagaacactggagtaaaacagttccctgaaaatctttcaaggattagtaatgcagcaaaggaaaagaagacaaaagattaatgacaactagattggactatgcaacttccatacgaggctttactctaccatggatttgtgtgtgtgtgtatgtgtgtgtgtctgtttgtgtgtacgtgcaggtcacctgtggtcagtcatagaaaaattgtgtgtgttgataaacatttgaaagattaatctaaagtgtttaaagatgcttttttacttcaagggttgttcatggaattggaacagaaatgctggtcccaagttgatgaatatctgtgtgggagagacacacactgaaaaaataaaaataagaacttaggcaaatgtattcatggttatattgttcttcggttggtgcagcttgcatttcagagcagtcagctgatgtcaaataactatgggaaaagtcagtatactggactgaagatcaaacaaaagctggttaatactttgtcaacaaagggttcgtgaaacagacattgcaattgacatagcaaccacgagcattgcaaccctggtctgggagctactaaagggctgatgactaagaagtatcattcttttgagacaggtcacaactttccttgcccttataattttacctttgttttcttctaaaattaacttggtaaagtttaatttactgcctgcttatgaaagaacattgaaactatgactgagtcaaatcaatttaaagagaactgctattgcatttattcttgagggttccatgtggcacatgaactggaagatgctcctgtatcatttccctcctatgatgagatacataggcagtctggggtgagagacactgatgaggcaggcagccaccaaggatcgctgatcatcctactttgctctaagtgagtccatggcttttcactgatgactgcaagattatcaagtccatattctaggctactcgaaaagggagagactaagcaaagagttggaagtggcaaggaatcactataggggtatagtgatactttgaaaggaagcacttaccagtatcttctttgctcccttttgactacaactcagcaatagaatttcatattttacaatgtgattggaactctagatgtgtggggctgggcattgacatgtcaacttaggctatctatcaccttgtataaataacaattttgcattacttgtattgctgtagtagatgcttatattatacttaaattactctaaaatttacaaaggtgcattgcttagtactaaacataccttttaccccatttaaaatatattgagaaagaaagagagagagagggagagagagagagagagagagagagagagagagagagagagagagagagcatatagatactcatgtgtcatcacatcataggacaactttttggaattggttctctccttccacggttggttttaggaactgaattcaggttgccatctcaacaagcacttctactactaagtcttctttctgcccctcattccctaccaagatttatatattattaatggatatgtatgtgtgtgcccctgtgtttatgtgcaccacatgaacaccacattagtgtttgagaagacctgcccagtatggctgatggttcctctggtcttcaagcattcttaactgctgagctttctctccaggtaccaccaccacccaaaacacatacattaggaagctgtactatgatttctgcactcatgttctgatataaatttgttcccacttactcttttagttattcaggaaaacaattcccaattattttttcttgattatttgggaatatcacaccatacacgccaattgggctcacctcccagtctttctgtgttcacctcctcccctgtaacttctcctcctcaaagaaaaaaaactctgtgttgtccatatattcactagaacatggtcagattcctagtggccagccactaagggaggatgagtctttttcagcctgcctctgcccgagaagtcatcaacagaggagagccttaaggtagccagatccagctctccttccctgacaccatggcctgtaccatagtgctatgggctgatttggggtgaggccaaatctcccatgagggcagggccagctctcctgcacacacggatgttaacatggcttttggaggtagtccagcccagggcatccacatgggcttcagtgataacatagacatcaatacggcccttggccatatcaggactactgatccactcgtggccctcagtgactgcatgggccatgagcctcaacatggcctcatgtggttatacatgccactcacatcaacatggcttcaaagcccaaagacatcattaagctaccaggcagctgcacactgcatatgtctatgtgggtctctcgggttccactgtggtctggggcagcagcatggaccacggacactagcatggcctccagtggcatagttgtccacagtggtcctttgaggaggtccattccagaacctttccacatttcaggcctccagagcgtgggcatgttcaggggctgagtctatgtctgcttaagctccatactgttgtacactatccagctgtccctaccaggcaatgacagcaggtagatctcagccccctttctcacctgtcaccaccatcacatctccagttccacctttctccacagtgcacacaccattcccttctttctgtctttcccagctctccatcacatgtttattctatgtagtggtgcttccagcaccaccatctctgggctgcaaggcgctataccgtcttccttccaccacctgggaaatttatcttttaaatgtcactgctttatttaataagaagatgatttatctttaaatattaacaaatgaaaaatgcacaaaaatatttttgtcttgataccatggactcactcatcccaggcctcacatactctaaccaagctccatactgagctatgccttagaccatctacctcagaccttaacaccagatacttattaacagagtgttaagcctccattccaaaacctgtctttctatatgtgtaataagtaggtataagtacacatatgtatacactcatatctaattatatattcacagtttaacagtaattatattatatatacaattgcatgaatgagtatatatgtaaatatataatttcctatatctagcatacatatgtaatttaacatatgtctatgggatgatgataaatgtaaaatttaataactgcctctgtgtgctcagtggcaattatcatttttcctgtatggatttatgcctatatttacatgttcttttttgttttgttctctctctctctctctctctctctctctctctctctctctctctctctctctctccctttctctcctgtcctggaactcacaatatagaccaggctggcctagaactcacagagatctttctgcctctgccttctgagtgctagaattaaaggcatgcaccaccatgcccatctatctacaagttcttgataagtatcctgatagtctcttatttatatgtaccatgattattgtaaattattaataaaatgtaagcatcatgacaatgctgagggtattttttccctctggccatgtgtgaatattgtgctatgaaacttctcaaaatgggctggagagatggctcagaggttaaggacatttgttgttcttgaagaggatctgggtgcagtttcttcccttcacatttgtaactccacttccaggtgatctaacaccctcttctgagggcaccagccatgcccatgacttctaaggacaccctgcatacaatgcaggcagaacacttacactcacaaaataaatcgttaatacacacatacaacacacagacacagacacagacacagacacacacacagacacacagacacacacacacacacacacacacacacacacacacacacacacacacacacacacacaacctttattaaacctttccaactataatctgaaaggcagaaaaggatgttgagttagtcaagacaactgaattctgattgcagcttggctcactgactgctatgggaacttgagcaaatcatactttctttccaggtagagatgacatggaaagtccataacttataccaacttttatgcattaggttttcataaatcttgttactactgtcaagccattatcagctctatggatacgggtcagatgctgactattactgaagcgtagcctggagccttgctgaaggattgaatgcaaatgtcagcctacctatgttttgacttattctccagatatcccaagcccattcctcttctttgtctttgccagatctaagtgtagagtcatagcttgcaagaggttttatttttattttttccatttgagcaggtcttgtctatggctcttggacagtttatagagattgcataaatttatttataatggtgctgagcctgtttttgctgcatttttcctgaaatacttgttaactttgtttgcctttataaatattacccagatttccattactggatgcttattgctagaagaaaaaaaagttatcagagttctgttgattgatcttggattaagctattctatcaaattgggtagtttagtgatttttctttttgtttttttttttttgtaaactaggatttccagggtccccagatgtaaaatcaagtcatccacaagtcaagagttttatattttctaatgtatgtgcagattattttattttcttgtcttttgactaagataacagtgaagaacaaattaagaaggaacacaaataagaatttgcaaaatagtaaaagcataatgtttattgccttcaggggagtttctgatattttctcatttaatgttttatttctaagggttttgatagacatttttcttggagtaggaaaactttttcttacttctcaccgcttccttatgtttatgtacccatcatttatattctttgaatggaactgataaatgagaaagcacaattgcttcaaagttctcaggatattgccaaattgttttgtaaaaagttatgccaatataaaacccagtaaatgatgcatatattaaaacaaagcaaaacatcattattatcataagtgcttacttcctctaattcatcaacactttaccccaaatgaatctcttttttcttaataataaaagcaagaagttgcatagcaattaccagatttcagacagtcttctaatttataagtcttacaagaaccctccaagctaggttctcaggctatcctcagggtccaggaggacagctgtggcacaggaagattaggcaattcacctggcatctctctctaagtgacttagtcataatttgatcatagatgatctgacccttaaacattcttgactgttgtattggcagggtcctccagaggaacagaccaaataggaggcatacatatactattggattcatttcctagtgagggctacatagcccaacaatggccatcaacatgctggaaggacagggaacatggcagatgctccatccacaaatctggacccctctgtagtcctaatctgtctctgaaagcctggaagatccttggagagtcatggggaccaggtccacattggaaggcccaagaaatctgcacctgatgttggtggagcatggcagtagcttgatagacagacactcccaggaaaggcaaaggcaggcaggtttatgtatgctgctgcttggtggagcatttttatatttaagtagcccacatgggaatcagatcttcctcctttatcttcttcggagatgctcttataaacatgctcagaggaacgcctcctagacgactctaaatcctggcagatggacaagaccatcaccatacccgctatttatagccaatagctgtttggtgtctgctatacagcaagagtcacaattagtcaccacagccacctcctccagtgtcattcccattcagtcctttgcacattgtggcacacattgagcatttgttgctaaatgaaacattggtttggtggtggctgcccagtgattgatcctcctgagcctttggagttttcacgttgtcattgggttgtagctagtgtgtgacatagtatttgatttgaggggatagcatgtagttattggtcatatttagtaacattccattcatatccacactaacaagaaacaatctgaaagtagatattagtaaagagaaaaagcttagacaggaacacattgtttatgtactatttgtttgtgtatttacttgagaaagtgtcttgctttgtagctcaggctggctcagaatcccgagggctggggttataaaggagcaccaggatgcccagcttcaatattctttatttagtcttccagtactggcaatgatagctagagcctcacacatgttacacagctaaatcactgagcagtgtccccagtcccaggtacaactttaattgcgtaatatatagctgatatttaaaatgtttaactgactatgtaggttggacatgattccttttgtggacaaagaaactgaggcatcaataaatactttccacctgattgcacaactggtaaatagttagtgtgggactgaagttttgaatctcgggctatctacttccagagtggtgtgtgtgtgtgtgtgtgtgtgtgtgtgtgtgtgtgtgtgtgtgtgtgttagacagaacaactttttgtgtcatcctcatgtgctgtccaccttgttttttgagaaagtatctctcatctgacgtggaattctccaagtctagacaggttggctggctagcaagtcccagggatctactcccctccacctctctggggctgggattgtgagcatacaccacaatacccagatgcttttcagtatctttactgggatcaaactcaggtcattatgattacaaggcaagtcccttacacaatcaagtccttctgcttgcagggcaggcgctttcctgactgagtcatctccctgatccgtttccagagtcataatagccaaatcatgcttcctctgggaaaactcagaatacatttcctgacacaactatggaaaagaagcaaactcacatttggggtttctaatttgaagtccatttctaatatatttcagtttagatagtcataacttccttggctgtatcaaatattaaagttaatttatggttttagtattgtgctggtttcaaaatagatcatctatctgtccatcagtctacttaccccttcaacagtgtttattaggtctttataaaggctggccaattatatcaagaggacttgaaatcctagctctaaatcatgctgtcttttttcatagttgtgagaccttaggtaagtcattcaacttgtttgagtctaatccctcttaggctaagtagaagaataacttcctactactgtgggctactctaacggtggtggggggctgagcgtagggacagagaaagtggttaggaagctgaaaagctaggcaaaggtgactgtgcatccttttgatggagaagagccagccaggtgttcttgctcactctgctttggggacaggaagggaactacatcgtcttgcactgctggtctttgatttctgtctgggtttgaatttcagctgtgacacaaggttgacaataaaaagctttgaaggaagctagctcagggatccctctgtgtatcatctcctgggggttgtgataggcttaattgtcagcagagtgtcccttcctgtgtgttgtagaatacagaatgaagtaatacagaacaaaatcatcagcacatttttacacagaaaagatgcccaaaacaagaacatggctcatggaacttagtggagatgggtgaggtggactcaggagctcacactgtcgtgctgtcctcagactcctcaggcctccttcccccaaaaaactccaatttaaatttgggggcatctttgttttccgttgtagaaaattctctcctatgccagtgtctttgaaggcaacttctccccagagagaccaactacatttgcatcaactagtgataagaggaagtcaaacaaattccacttctgttcaaactcatgggagatgctcacttctcagctctgacccagtcctgagcatctacatattatgacctgccccctcccggctcattcacaggtcaaagttggtggtgagctagtaggcttgtggaatgcctctgtccctgtcctgtttgccctcatctattacttcttcctgttcatgaaaatatgtttgcagggtagtttatgggtcagttgcagcagctagttgtagaactctgttgtctccactgttcaatgccaatcatttcatgagaacagagatgagtggtttgggaggttatctgcattgtattttcagctcatgcccctgggtgcaactgtgtgattaatgttggatagtacccttttcataatagaatcgcaatgtccagctattcactctgctgtctttgtgctttgtctagtgtcaaggaagtttggaggggaaaaaaaagtgttgcagatgaaggtttaggtgtcccaacagaatctgatggagatgggagcctataatatagggaggaagtaagtagttgggcttttgtttcactgtttttgagggttaaatacaaaggctatttgtacactctgacacattctgactattattttgtaatcaaccaaacctgtcagtcaatttgagttctgtttcctgaccctgtatggccaagtgtcggttcttagcttccgtgtttagtttgctcttctgataaaaggatttgcccacttcagtcccacggttggttgttaagaagctgtgataggattaaggctgagagtgttcacacatactgaacggtatttcttggatgctctggaacccgctctgctgcttcctttgtatggagtataactggaggtaactgcaaagcagtcagtccagaaggaaggccaacttaaatgagctgacgtatgtcagtattactctgtgatggtgatgccaggatacatgtgtgtacaggggaccatacagaaagtggcagagtgatgattggcagaaggtgaaaagtgcatgtccaaatggccagtaccatccccttggggcacccccctaacatgataggccaccactttccatctaggactctctagtggtcagggattctggttagtctagtctgagctgcatagttgcaggttggtctgacttatttcatgtgagtggctgaagttacatcaatggatgcttttgccatatggagggaaatcaatctgaacggagctgaggaccagtgggttccagattcaacatcgcaacagcagtgtgtgctttactgagagtgagagctcaggtggtgggcaggtacaggactctgaggccctcgcacagtgccctggatgagtacaaaatgtcagcaaaggtagctggggtctcagacttgtcaaagtgcttctcaaagctgttttctcatttgcgcctttcatcagccctatgggggtcagtgtgcgaaatctcctttgactagggagaaaagaacctgcagagctcttaagtggcagggtcctgaaagaaccttgggcccagcctctttctcttgaaaagtggcccatgtaaacagtgcaggtgaggctttgacagtcacgtaatagtggtgagggcagaagagcagcaattctgaaacacattcattccagtaaggtggctttgtcactagtgtaacacacatgacagagacaaaacaaaacagtgctattttaatcgtcattatttgtgtccccaaccaccaccaaatattatttcttgaccgccattaggatccttaccaagttacctgagggttcttgtgtctctcaagcatggtgcactgtggagtaccatcctcccttgcctagcagactccactcaccacgaccagttttgttcttagtgatgtggcttggtgagaacactggttccagtccccattttctcagtgtcctaccaacatctggcaaggtgagtgtttgaaatcctggtttgagggactgctgtcccgcaagcacaatagctttctgaggtcggggaggctttctctctggaccaggctcaggggtggcaattctcccagactcacttgcatagactgttgctctcttaccaacagtgtacacagcttccaccctcctccgtccttaccagtgtttgttctttctttagcagctgctctgactggggtgagatggcacctcagtgaagtttgatttgcattttccaaatggcagaggtgttgaacctttttccagggtcttattactccttttgtatggtcttattgactattaaaataactccgtttgtgaactgtctgttagttcatgtgttggtttactgatcggatggctttgttgggtgggaggggacttgcagactttgctgggtggcattctttatgttttctagtgttaaccactgtcggatgtatagatggcactctccctgtgttctgtagcctgtttcttcactgggtcattgtttcctctgccgtgcagaagctcctccacttcatacggcccccaagcccagtggccatcaccagactttttcatgaactcactacttggagtcgttcccttgtgatctttgcttcctctgagcatgggctagccactgctttgcttccttccatcgaacctgatattccctgcgggggtgggggtggagggtgggggtgagtgtgctatatctaacacagatggtgtcaacatagaggatcaacttccgatgttctgaatataatcatgtaaaaacatcatatatccaataggaactgtactttgcattttgaaagtcaattgtcttcattaatatatggactaatactctcatgtggttgacagatccatgtcaaccacatgaccctgaggaaaacaaccaacacgtcatggtatactctgtcattaaattataatgttaggtgtattagatgctctgttattttatggtattttcaatttatcctatgtttattgagacacacccccctttgacatcaaggttgaacaatgtgtatgctataaattcccctgtgtgtggcttatgatctgtgagtgatgttttattaactgacacaaaagaagtttagagatgctgaaggcactaacagtgtaagcctggtgacccaagttcaaatcccagaataaaatttggaaggagggaactgactccacaaagtagtcacatgacctttacacatgcactataacagttgcatgcctgtgtgcacttattgtcacataataataagtaaaaagtacttaagcagaggcttaggacaaggaagattgccacttagaaattactgtcaatggatgtctttttctttttctttttctgttgctatgataaaataccccggcaagagcagtttagaggagaaagggtttatttaaagacccacaattccaggtttcagtctgtcactacagggaacacaaggtggcaggaacttgaagtgactagtcacatcacatcatcagtcaagaccaaagagcaatcaattaacatgtgtatgttagtggctagctcattttccctactcttagatagttcagaatgtccttgctagggaatgatgccacccacagtgggcatgttttcccacctcaattaacataatcaagataatccctcagagacttatctgttgaccaacctaacctagaaaatccctcattgagtctcccctccctagtgattctagattgtgtcaagtggacagttagaactcaccatcccagcaggagagatgaaacatgggaattctgtactaacttagaaggcaacatttttttgccattagcatgtatttattcacagaagggtgggcctcatcatggaatttttatacgtgtatatcatttaccttgctcattcaacctccttgctctcttttgattccttccattgatcctttcttctcatctaataaactccctcctatgttttataccacacacacacacacacacacacacacacacacacacacacacacacacacacacaaacttaaacattaaacagacaattttgaaggtgagacaaaatatgtgtctttctggcttccttggactatctgatgacctgatccatttaccatgtttctgacaaaggacataatttcattcccctttgtgactggttaaattccacaatgtgcatgtacattttctttatctcttcatctgttgatagccatctacactaatctcactgttttgctactgtgaatagcacatcagtaggcatggatgtgcacttctgtgtttcatgctggcttagattccttcaggtatgtgtattagtatatgttgatcatatgacagttttttgataaatcaccatgatgacattcatagtgggtgcactaatttactttctacatccagcttataagggtttctcaccctgcatgttcaccagtgtgtgttgctagcatgattatagccattcttacttaggcaagatggagtctcaatctagtctggtaggcattttctgatggataagcatgctgagcaaattttttcatgcattgattatctgtttgtacttcttattagaattgcttgcttatttatctcccagttaattgagtgattagatgttttggctttctgcccaatgtttttagtttcttatatagtctagatactaagcccttgtcaaatgaatagatagcaaagactttgctctgtagactggccatgcactcagttaattatttcttctgctatgtggagcttttaaatttctttcaattccatttgtcaattcttgctatggtttcctgagaggaggcaatagttgtatgtaggtatgagaagagcatgatgttggccagtggagccagaaataagctggcagagtaatacaccattagcagtgtggcagtggtgagcagggatggggagactctacctgtctgtctagagtacttgagtgaataatcctgtctgtggaggatggaccatgaggacagcaacaggattgcttagtcatcaaaacccaactcaggagaaagggtctcagaatgggacaaaagcaatggactcttgaaattgcctcagaatcagacaatcattttgtgccagtgtctatgtcttccatgtatcttattttctctgtgtcttacatctatctgtacttgtcatgttttctttgatcctgtctgatctactatagtttttcctttatctctatcttatttcattgtttacttcctccactcaaccctgtcttctgctcttagatcactagaacataaaatgaaattactataccctttggaagctgtatatttgtggcgttaacctttatgttccctgctctggaatttcaaaacaatataggtttaattgtctaattataatgatcattcttttaaaaaacaaaataatattttattttaaatttaaatttaaaatctttttgagaacctaataacagtactatatttacacatcatttctgtccttccctgtcctcttgagactcctcctgtgtccccaaacccctattccttctgaaattcataatcttttcttttttaattattactttacacacacacacacacacacacacacacacacacacacacacacacacacacacacacacacaccatggtatatgatggaaggtcagaagacaacttacaggagtctgttctctcctccttccactgtgtgggtctgaggagccaactcaggtcttcaggtaagcacctttctaagttagggcttctattgctttgatttaaaaaaattatcaaatgcaacttgggaaaaaatgggtttatttcctcttactgttgtagtgcatcatccaggaccttggagacagcaactgatatagagcagtggttctcaactctcctaatgctgtgaccttttaatatagtcccccatgttttagggtgacccccaaccctaaaattattttgttgctacttcataactgtaattttgccactgtcatgaattgtaatgtaaatatctgatatgcaggacatctgataagcaacctccaagggggttgcaacgcacaggttgagagccattgctgtagaagaatgctgttcactggcttgctccttattgcttgctcagcctgcattttagtacactacctgcctgtgggtggtaccactcaaggtgggcggggcccttccacagcaaccacttagtaagacagtgtcccactggcttgtcttaaggaaacattttctcaactgtggctcccttttcccaaatgactctagctgtgttaagttgatacacacagcaacaacaaaactatccaggacagtacccttatccattgggtcatccacctaccccataatgatcattcttcctctgactctgtaaaaccttaaaagtgaaaggtggctcccactaatgcctgctttgggttttcacacttcagcgtgtatttcctcactgagagttaagtaacgtgtgccaagcaaatctgcctcttgtacctattaaggatagctccccaaacaccaatttcccattggctccagttgttaaagatggtaaaactgcacttaaaatggcaactttgaaaacaaataggctagatgtgaaataaaatcaagggaaccacacatatacctgccttatcaacaacagatattgaagtgtaaatcaatgggactattaatattgggtaaaaacagagatgaacaaagcagagcactatagtagaccccacactggactaggtgtcctcgctctattagggtttaataatcacaatggcccaggttagtgctattaattccattttaggtgggggtactgaggcttgggaaagttaaaggaattgtaacacaagtacagaatgagcattcttaatgtatgatggtttgtactaaattttggaatacttacatacacatgacgagaaatattaggaatggaagctatgtgtaaacaggaaacactgaagggtagacctgaattcatttgtgtttcaattatgcctgatacatatagcctgaagataattctctataattaaaaactaattttatgcaagaaacaaaattttatggtatgtgactttctattcataatgtcatgtcagcatgtaaaaactgtaaatttcacagtttcatatttcatacttttcagattatgaatgttcaacctgtaataattagtgtttattttgtagcatcttgaggtttttgttgttgtttgtttttcctccttgtggtaaaacatgtataacataaggtgtaatatttgaactattttaagtctataattcaatgacatacacatttataatgtatttaatgattatatatttctataactttctcaagatcccaaatggaaactgtgtagtcatgtgacggtttgaaatgaatgagcaccatagtttcatatatttgaacacttagtcaccaaggagtagaactgtataagaagaattagaagaattaaaaggtgtgtaaggaatctttctctgtcccaccagctagagacttataattaattatgaaggcttggtctataggttaggcttgtttctagctatctcttgtaacttaaattagcccgtttatgctaattttgttctatcatttggcattatctctctcccatcttgcacttcctgtttccgcttcatgtctcctagcatcttctatgcacctagattctcctcttctttctttcaccaaaaatcctgcctgtaacttctgcctagctattggccattcagatttttaatacaaaagtcacagcaaatacgtcccacatttctccctttttgtctaaataaaaagaaaaggttttaaactctaacacagaaaaactatctacaataagaacaattaccagataacaattacattcacaatgtccagtacatttgtatttggcaaatttggagaaagtactgtattatctatcctatcttagtgagtccaaagttttgtacctaatatactttctatcctaacttgtattgccaacccaaaactatcttttttgaccacaaaacattttcttagataaacaacttaagcttttatgtctctcaaccttgtatactttatatctcttataattttcttttctgaatttggtaacaagggaaactgtaaccatacctatctcatcttcaactccatcagagacctgagaaagataaaatattacctgagtaaacaggaagtggagagcaaacacgtttcaaaactatagagacaacagacacagctagctgcctggacagtcacccaaggttcttctgggggcatccatctttggcctacaggcctaatatctgacagatttttctgtgaagcagaaagtttgaaggattattctaccttgccttggcaaagtttggcaagggtccttttatgtcctgcttatccagtttgaacagcattctgtcagcaatcaaggcaagggcagtttctttgcccagtggctaactttgccacaaggaaagaaaactccatatgaaggttcttcaatgcccatcatccttttttgaaataaatttatactgccaggagcagacatgtgtcattgtcatgataagccttatattattaaaatattttaagtgatatataaattaaatttgtgccaatatacaaaagtccataccaatgtaaaatatttgagactagtggctgttaaaaagtggactcaacaatccacccttgtatcccactatttctgtattgtatccccccttcccttcagaaagagatccctgaatctaattttctttgttcagctttttttctgagcattaccaataacaacttgtaaccagcccctctaaatgatgacaaacatccataatccaccaaatgaccaaaaaatacccactccaacttttggggatgtggacatagtgttctctagactgcttcctgttgtctggggggtgatggcatctttagaggcaccctgagaaaattaggataatgttcaatcctgggagagatagctatattatttttttttgttagtctctgtgtgattgggaagtgtagagattagtttttggctagatagtctgtgaggatggaccatctgaagtagcagctttgaagttgttctggatgtagaattttgaagaaactgcaacagaagcattatgagaggctggatcacctgggctacctatttttattggtgtctggttccttttgttcttaaaacacataaacttttaaaggtaacatacacacacacacacacacacacacacacacacacacacacacacacacatgcaagtatggaatgtgcagtgtgtacaagtcagctaaagatgattttttttgttttatgtttgagcaggtaaaaggcagctgttaactttataagtctgtttggactgtataaccaaacttctatccatgccttatgaaaggatggcatgtaataacaagccatgagaagtcataagaactctgtatccaacaagattcatcatgtctcacccagtctcagaactgttcccatagtagagggatcagcatacatatcacctgtcctgtagtctgttgtggaacattcctttacaactgtgtgaaggtgtattaatgtgtttggtttaataataagctaaatggccaatagctaagcaggagatatagcagggacttctggacagagagagctctgggaagatgaaaggcaggtcaccagctggatgcagagaggggcagggagcaagatatacaggaggagaggtaaaagtcatgagtgacagggcaacacatagatgaatagaaatgggttaatttaagttataaggattgttccttactaatttgtataactttattagcccctttatatcaatctatatctatcacatggcattactgttcttccatcttgcacctcttgtttcctctcagtgtctgctggcatctcctattcaccaagattctcctcctctttctttctctccccagaaatcccttctatacctcctgcctagctattggctgttcagctatttattgcaataatcacagaaaatacattttcacacagtatataaatatcccacaacaaatgtgtggcctgattggaggaagtgtatcacttaagtgggctttgaggtttcaaaagcccatgccagaaccagtgtgtgtcactctgtcttcctgctgcctgcagatcagggtacatcaatgccatgtctatctgcttcctgccttgatggtcatggattaaccctttaagactgtaagcaagcccccaattaaatgctttcttttataagttgtcttggtcatggtgtctcctcacaggaatagaacagtaacaagacaagtcgtcttcatcccactttgccccagccccagtagtctctattttactttctaggtactgtttgtctcttccccagctagcgttagtggaaagtagcagaatgtagtggttatgaacaagaactctaacacacaatcaagatattgcttctttggtgagttgttatttatttttgtattccagtataatgactacaaaaatattttgtggttactcccttcctctttcattttagattagagaggtaaagtcttagctggatttgaaagaccaagattcagtaatttcaattattcataggaaatgaagagtggctatataatatggaaggaaacaggaagatgttactcatagaagttacaaggacacatattggctacacaaagaaataatgagggttcatggtcctgcatcccagaggaaatgatctcaaagtctatgtcataaatgtggtatcaaaatggaaagaaaaacagcagacacacacacacacacacacacacacacacacacacacacacacacacgagagagagagagagagagagagagagagagagagagagaggagagagagagagagagagagagagagagaagagagagagagaatcctagttagtgagtttgtacatttatatatgtgtatggcctcaatatcttataattgctgtagtggtttattttttgttttatcagcttcactgtactatgaagcacccagattaagcataatttctgaatgtgcctatttagaatgcttccaaatgaggttatcctttgaacaagtgaatacaataaagcacattatctcccccccccccccccgcagtgttggtgggcatcatctatccaacaaaagcctgaatagaacaaaaatagaaagagggggaattggctcctttctcttcctgcttgtctacacgagttgggacatagatcttctcctgtcctttgtataggtttacattaccagttggttttcagacttgggacttgactagagttacataactaacttcccttggtctattgcttacaagaaacagatggtgggatttgcaatgttaagcatatgcgccagttctaataaatttctgtgtgtatgtcatccattgtattggctttatttctctgaagaatcctaactaatcagtccatccatcagcctatctgtcagcctgcctgcctacttatcaggaggaagacagatgcatagtctaaatattactcttgattctgccctgatccaagggcaaagaacttgtaaaattctcttttaaatattttgaaagtgggattttgcttgtaaggagagtgaaatctaatgtaaattcatgtctagttccctttgagagataatggaatatatgcaatgccaagactgtcctcagaggactggccaagtaataacaaagtcacaaaagcctagaaaaataatgatgttctttaaaattgccctgccccaagccatcaaaacatggttaattgaacctgtcatctaaaagccttggaggaaaacaggcctggggtgacaactatggccaaaagactttgggctaatagttttacctgtctaaaacaggaaaataaaatctatactataaagcagatatgggaatccaatgaggtaattcaaatgcaattgcttggtgcaaagaacaaggtaaatactcattgaccaaatggcttatcttaaaatattatttctcttaaatgatggtaatggctgccgtttgtttttagaggcattttccgtgttatcagaatcattgtatatcttctttacaacttgtgaaggaatcgttatgattctggctgttgtttgtagatgaggaaattgaatctcagagaggcagccaaggtcacagaacagggcaagtggtatctaatttcttgacctgctcaccagcctcccatcacccctcatactcagaaccaaatctgaccttgcaccatggccctgccacacagggctctcttgaaagcgagatgtttattgcttagtaagtgtgaggagggtgcatgactgtgtgtgtatgttggggggagtgctttagtaaatgacctctcttttcctttttttttttttttttttttgtagaaagggaagtgattgacttttattgctggcttcagacttcaggcagttgtttgtccccatcaacaggtgaaatatcaataaatcaaagccactcagtcagcgggagttagccaggtggtgatgctgagcagtcaccaatggcataaatcatagctgttcagtccatcagtatccaagtgggggcaggctagaaagctgaccagatcggagattcctagaaagatgctgaaaggcaaatggctgctcttagaggtatcttatcctcatgaccttgcatgcatacccctctaaacatgggagatggagtctagggcctgagacacagagttgaacttcaggctgttagtcttaactaaaactcaagcaggtgagctataaggtctgtaaaagtttgaagctcaccacttcgaatagtcatcatctcttctcaatagcctttgtcttacccatttggctacccactcctcattccttgactgtgttcatttactaagattcttttgcctgtggccctttttgccttcccagctttggaaggttcaagaacttaaacaattaccacaggcctgggttccaggaaatgcctcctgtcagtcttccccaacacttacctatctggagtgctatgagcagaactttctgccttttaatctttgacttaaaagctatcagttattctctgtcaagcatcagccttctagagttggatctggttcctaattttgtgcatataatacacttatctgaagagaaaaaaattcatttagaataatagagggcgacatccgtcagctgaagctataatgggcagtatgattaggaatagtagttaactcatgggctgttgcataaacagggtattacagaaagacaagagtctgcccagagggattagtataatggcaggaagagatcttatttgttaatctaacagacctgatgttgagctgatgcctttgtagcatgacaattattactggaaaagaattattcagcagtagtataaaaatgtcacaggtgctccttcttccaaaggaaagacttggtttccatttggatttataggaggaagtaatccatcctgttacaaagaatgtaccatttccttcccaggggcacagttcgggttttttttttttttttttttttttttttgtcagaaatggtgttttcatggagagaatacttctgaatgactcacacacagctgccaaagctacgccaatgctcaggttagagaggaagaggggctcagcctcaccctggctccccagtgttaattgggatcatgcaagaagctgtcagcattttcttacagagatagctgagaataagtaaaccacacagaattcaactagtggcacattttcagcctaagaggttgagatgttggtcagcagcatctatgctcaccttctgagatatgtcagggtatttaaaaagggagaattcagggctggaatagagttcatgcatgtgtgtgcttaccagtacaaagtcctgagtttgatccccactataccacttactagagggagaattggttatctcagccagatagtcaggagtctgtggaagacagacaatggtcatccattgcctgactcatcttcttttatatgccctcctccacttcataatttgtacagcacaattttagggttcaacttttttgttttcttttttacagtctacccatttgaaaaaaattgaagtagcttgcacaagtcataaaatgcagggaaacccataatttcagcacaggagagaaaggaaagcaatggtaaagctataaaagggagccggcttggaaacaaactgctgaaagctgttcctgctgtatacatttggctcactcgaaggagccgtctgagaagggggactttagagttccgagactcacactgtgttcaacattgaaacagactgattgctcaagagaaggataattgtccttgggactgccaaagaaatgtgtctctcccgagcactctggaactacttaacataaggaagagtgttgtcattgccccaccggtaatgagatttgatgcatgttctcacagttaaacgagagtctaattcagcaagggccactgcacaggtgttgtttagctacctcgtcactgctgtgacaaacacctgaggaaaacactgtggaggaggaacagtataatttgctttgtggtgtcaagtttcaggccatttttggcgacaccatttttttctgggtatatagtggggaagcacagtgtggtgactggacaatggcagacagagtccttcatccactggctgctgggaggagacagagaacaaagatcaggcattttcagtacaacatgagtctgaatcttctcaaacactcagacaacaagggcatcaaggccttttattcaaaacaatgagaaagcaatagaatgcctcaaaagtctcagggcaaatctttgtcctgggccgaatccatcttcaaaactgatattgacatgttaatcctggagctgagtcttctggtcctgtggcaaacatcgcttcgtgcctcatgttactcatttaaaaagaaagattgtttacaaaacacatgatgatggccagtgatggcttggagggtaaaggcacttgctgacaagcctaccaacctgagtgagttctctcccctgaatccaaatggtagaaggagagaaccaacttccacaagttgtcctctgacttggctgcatgtgctgtgcatgctagcttaagtgtactcgtgcacgcatacacacacacacacacacacacacacacacacacacacacacacacacccctcataaagaaaaaaaaccctttgtagtttcacatgaactgttacttaaaaataatcatcactgcaacactgtagaaatgatcctatcactatcttaaactaactattgttactccacctatcctagcttttatatgtacactttaaagctgctttaatcatattgcaccatccaattttactttttgatgtgctgttctactttatacccatgcttttattgttactatagaatcattttaatgccttttctctctctctttattgaaaatggatcttgttaaagatggtatgttcttgttatagttcctctcccccaactcctcctagatctttccctcctcccccccaccatccaaatccacattctttcttgttctctgtcattaaaagcagacatctaaaaataaataaaaataagataaaataagcaagcaaaccagaacaggacaaaacaaacacggggcagggagggaaacaaagaaaaggcagaagaaacacatatagatacagaaagtcacagattggcacacacagaaagcctatgaaaacacaaaaccaaaagccataatatatgcaaaagacctgtaaggttaaaaacatgttcagataaagtattaggagaaaaaaaaaaaggacccaaaacctcaaaccaccgttgagttcactcactgctgggcatgtggcctccccttaagtgtggtttcttagtgtctttttttaaatggctatatgaaattttgtatcaattttccatttcagttgtacttctcatagaaacatgatgttttctttttctgttacaagatttttctggctcataggattccctttgccttcatgctcacttttctttcagctagaaagttgtgagattttcctcttcattcttggtgtttggaagttaattccaggacatagataaatctactttatctttcgataatatcatctaaagtccaggcttttgacacaaaacttcagatccctttcaaggtgagttttgcttttgtttctggccatttctttccccttgtcttttctttttcttgtgggatcgatgttccgtcgtgggtctcctgtgctcctttactatgggctaactgttctgggttttcctcatttgatgtctccgtctctcaggccaggagggttgagtatcaacaatgatcgtctccttgacttcatctgctgatttttttttaattaaatgtttctagggacatcttttgtcttgtgctgagcatgaatcttctttggctttgtaatagttgcttgtagtccctctggtcatcaattgcacacttagttgcctaagtcatttgtggtaccaaaaacttgaatagacatctctaatataattcatatatttaaaatcaaatttggtttttttaattgagctatacatttttccatccctctcccctcctctcctcttccatcctcttctctccccttctaccctaccctttgcccttcctgttcccaatttacccaggagatcttgtctttttcactttcttaggtggatccatgtatgtctctcttacagtcctctttgttacctaggttctctggggttgtggcctgtagtctggttgtcctttgctttatgtctaatacctgcttatgagtgggtacatattatatttgtctttgtgggtctgggttacctcactcaggattttttttctagttctgtccatttgtctacaaatttaaagatgtcattgttttttacagctgagtagtacttcattgtgtaaatgtaccatattttctttatcctttctttggttgaggggcatctaggttgtttccaggttctggctattatgaataatgcagatgtgaacatagtagagtctttgtggtgtgagtatgcatcctttgggtatatgcccaaaaatgctatttctgaatcttgaggtaggttgattcccaattttctgagaaaccgccttactgatttccaaagtggctgtacatgtttgcactcccaccagcaatggaggaatatttcccttactccacatcctctccagcataagctgtcattggtgtttttgattttaaccattctgacaggtgttaagatggtatcttagagttgttttgatttgcatttctctgattattaaagatgttaagtatttcctttgtcttttggtcatttgaagttcctctgttgagacttctctgtttagatctgttccccatttttttattagatcattttgtcttttgatgtctagtttcttgagttctttgtatattttggagatcaatcctctatcagatggggggttggtaaagatctttacccattcagtaggctgttgttttgtcttgttgactgtgccctttgctttacagaagcttctcagtttcaggaagtcccatttgttcattcttgttctcagtgtctatgctattggtgttatatttaggaagtagtcttctgtgccaatgcattcaaggatagttcccactttctcatttatgaagtttatggttggttttatgttaaggtctttgatccatatggacttgagttttgtgcatggtggtagatatggatctatttgcattcttctaaatgtcaacatccagttatgcaaacaccatttgtagaagatgctttcttttttccattttataattttagcttctttatcaaaaatcatgtgttcataggtgtgtggattgatatcagggtcatcaatttgattccattggtccacctgtctgattttatgccaataccaagctttcattaccagttttcattactgtatctctatagtagagtttgaagtcaggtatggtgatgcctccagtagttccattattgtccagaattgttttgtcctcggttttttgtttttccatgtgaagttgagtattgttctttcagggtctataaagaattctgctgggattttgctgggtattacattgaatctgtatattgcttttggtaatattgccatttttactatgtcaaccctatctatccaagagcatgggagatatttttattttcttatctctttaatttctttcatcaaagacttaaagttcttgtcatacaggtctttcacttgtttggttagagataccccaagatattttatgttattgtggctattgtaaagggtgatatttctctgatttctttctcatcccatttatcatctgtgtgtagggagggcaaaaaattttgtttcaggacattgttaaaggaggcatctgggcttatggctcaggggtagaacacttgtttagatgcataatacatcagcaacacacaaataatatattgtaattgttctatgtattaacagaactaaaattgaatatctatatctatatctatctatctatctatctatctatatatatatatatatatatatccaaagaatatgtgtacatagaattgatgtacccatggtttcaggtgtttgaggattgttttgggacatgttaactctggataagagggattgctatttattttttttaataggttggtcttccctgccccaatccttgtttattttttacttgttgtgatcaacaagcccctctgggatctggttattttcctttgagcccattagagttcagccactttgttggtatagagtggggtagggtagtgagggtgacagagatgtggagtgatcctgagagctggatgggctatagtgggaagttatgagtttcctatggtcatcaggaaacagaaagaacaaagggtgttcactcagcctcaggagagccctcagtccagctcttcctccctccatctgctcctttggcattgcaccctggctaagatttagaaacactcaggttagctccaatcagctttccctctgctggccagagattctattggattaggctcttcccaaaaccatcaaacccttgcctatggctatgttcagatatctgcttcctcttccccccagattcctcctggcccaagggttaaacactgtaatggttagaatgagctataccccatattctctggcatttgaacacctcattcccagttggtgatgctttgggaaaggtatagcaggcgtggccttgctggaggaagtctaccactgggccagactttgaggtttaaaagcctcctcccacgccaagtacacattctctgctttctggttgccattagcagtgtgagctctcagattctgctccagcagccatgttggctgctgctgccatacttcccaccatgatggactcttgccccttggaacagtaagcaaaataaacccttccttctatcattccccttcctcatggtgttttgccacagtaacagagaagtaactaatacaggttccatactaggaaacagtttgtctggtgtctgaactggtgctaagcctagagtaagcaaggtaagacaggttgtgtgtgtgtgggaaaggcaagatgcattagtatgctgtttcactcctgccatgttttcactacctactctttatattttacccagggtattcattcctacattgtgaaagtcaaattaaaagaaattccgtgagaattttgggggtgatggggtgagatagggagggtacactggcagccttcagacactcagttgctggtacagtgctccatgttctctcaagacttttctaagttacaaagttctctttaagacagcgattctcaacctgtgggttgtggcccttgtcacagagattgattacctatcagataccctgcgtatcagatatttacattatgattcataacagcagcaaaattacagttctgaagtagcaacaaaataattttatagtgtgggggggggtccccgcaccctgagaaacagtgtgaaagcgtagcagcatcacggaggttgagaaccactgctttaagcccactttttggtttttcgagacacggtttctctgtgtagctttggagcctgtcctggaacttgctctgtagaccaggttggccttgaactcacagagatctgcctgtctctgcctctcaagtgctgggattagaggtgtgtaccaccaccacatggccttaaggtcaccttttgaggaccatgaagtactgggttgctatgtaaaacaagaagttgttacatatttgtatttctctattagaatggcctttagtaccctatttttttttgtatacttcaagacataggtgattgttttaaatttggttataaaataacaaaaataccaggcacatgcttgtctagcttgacactctccaggatggtgttgacaaaggtgtgccagtaacagaacaccacatcaggacatattaattcttatcctgcagacaacttagaggtttgtggcattattaattaaacaattttagaaaactattaatgaataaattattcatgttcataaattcagaaaagcaccatagtctctagaaggtaagacacaagtcttcttgcattgtcttcatcttccggtgccctccactgttccatgagctcctctagccatgatctgtgaccttgttttgtagagagccagatgacagatctgttgctgtctgtagaccactaaatctgtatcacaacccttcacctcgaccagagatgtgtggaagcagctacacaaagtggagtatgtctgtgttttgagaaaacttatagacaatgaaattggaatcccatgaacttttgtgaaattgtgttattcttttgaacttgttctattgatttttccccaaccactagatgatttaatggtagaaatagatgggcacaaagcacatcgtgaccatacctgtgagagtcctgcatgtttttcaacaatgaggaagaaggaatgtaaggtaattcagataataaatccctgagggaatgatacacgtttgagataatagacaagttaattggcctgatttggtcattctacaatgtatacatctatcaaaacatttttgcctcatacatgtacatgatggattgtcgatttaaaatgtaagactttaaaaagtacagagaaaatgagctaagcatgttatgtagttagcagtacagttggtaacttcaaaataaaagccattaacatagaacacgtgtttcagtattcataaatatatagatactactaaaagtaatacctatctatatattatacatacactcacacatgtgtataaatatgtaatctgtttatccgtctacagatagatatgtatttacagatgggtaggtgattacatgcacacacacacacacacacacacacacacacaatatttatggtatataaaaacaggtgctggattgaatttgacccttaggctgaaatttgctgaccctaactaaagatctttgcatatttaactacatttcaatgtatattacttctatttcttttttaaaggtttattttattttattttggctttttaagacagggtttcttgatgtattcttgactgttctgaagctcactatgtagacaaggttgaccttgaactcacagagatctgcctccctctgtctccagactactgggattgaaggcatgcaccatcatgcctggcatttttaaaacattttttattatgtgtttgtatgtgtgtggtagtttgaatataattggccctcataagttcatagggaggggccttgttgaagtagatgtggccttgttgaaggaagtgtgtcacggtggggcaggttttgaggtctcttttgcttaaggtttgcctagtgtctgagactatttcttgctgccttctgatcaagatgtagtcatgtctatatttatgctgcagggtcctgccatgatgataatggagtgaacctctaaaactgtaagcgagccgccccaagtaaatgttttcctcataagagttgctgtggtcatggtgtctctccacagccatagaaaccctagctaagacagtgtgtctgtgtgaattgccacttgtgtgtatgtgcccacagaggtcagaagagggtgtcagatctcctggagctggagttacaggcagttatgagcctcctgatgtgggttactaggaactgaactctggtggtgtggcagagcaccagacactcttaacttctgagccatctctccagtcctgccttctacctcttcacacagagctctatgtcatattgttctgcaccagatatttatattaagtttctattcctacaattctctctttctgcttctcctataatatttaggaacatgctgaaatagtgagcaataagaactgtctgaaacaccctatggaaggccttaccatccagagggaggtgtgtgataggtagggtttcagttgggggggggtaagggaggatgggagggagaagggaactgggattgtcatgtaaaatgatcttgtttctaattcaaataaaaaaatctgcaaaaaaaaaagggactgtctgaaaaacagaaacctgtttgtttgtttgtttttgtttttcgagacagaatttctttgtattgctgtggagcctgtcctggaactcactctgtagaccaggctggcctcgaactcacaaagatccacctgcctctgcttcccaagtgctgcgattaaaggtgtgtactaccaatggccctccagaaacctgtttttaataagtaacacagctacagaaaactttgcacatttttctttatgtacttctgtgaatatatgcagcaaaaattatagaagagtgatcaatttggcataaatagagttgaaaagttcctataccccaataagcctctctgctgatgcagcaatccaaatcagaccaaatcaaaccaaattagaaaaagcccatgtttaatggatacaacactccaggatagctttccggtcccccagagtggagacaggaaagagagacctctcttttttcagggggggggcagtttaaataccctgtgagagtggtcttgagcatctctgagggaggggtcatcatttggtgggctttctgagatgcagtagggtttggagggagataggggagggggctggggtggaactttcaccataacatcccaaactctttggtatatggatgccaggggctgcggtgaagcttccactataacaagagtgacaatacattagagtatatccacagcattttccttgtccagtcctcatgaaaatgctaggtggttctaaatctttccagaaatcatccactaatagagatcacagatacactatacaaaacttgcatgaacatgcatttcttcatatcttagggtttctatttctgtgataaaagcaactggggaggaaagggtttattccagtttacaactggcaggtcacagtccctcatcaaagaagttagggcaggagctcaaggcagtaacccgaggcagcaactgaggtagaagccatggggaggtgctaatcatccggttgttccccaaggctaactcagcctgctgtcttatgccccaccccctggtccaggactacttgtccaggggtagtgccacctgcaatgtgcgtcttcccacgtcaatcacttattaagaaaatgccccaccacttgtctacaggcctgtctggtgagggcattttctcagttgagattctctcttcccaaatgactctggcttttgtcaagttagcataaaatcatacttagtgacttcaatgcacaacaaaatgtttataacattgaagattctagctgccccactgccataccaaccgaggttccctaactacccaaagagttgacagagagtggcaaggtctgggatggggaataagagcaagactcttgaattttcatgatttaccagtgatctactttaaaagggataatagcaaattttagagagatttttatcttaaggccatctaagtgaatcccgtagaaaatcgctgtgtaatagttctttccgaaaagtatcagacatattttagtttggagtatgacaagctctgtttatatgcataaaaatatttttcacctagaaaaattggtgccacaaaaatgcaaatgacaggtaataaaaaaccatcaggtatatcaaatgactttatattccaggcttctgcttcctcactataaaatgagaatgttatggcatttgatatctaaggttccttctagctttggaattatgcaaaacatggacaaccaagaatgtaaggatagagatggtgtggtggtttgaataagaagtgccttcactatagggtcaagtatttgagcacttggtcctctgttgtttgtgctgtttggagagattatggggaaatgcagccttgaagaggaagtgtatcacctatccctgggggtgggctttgagcttttgaaagtttcacactactcttggtttgctctctctgcttcattattgaggttaaagatgtgacctctcagcttcctgctcctgcagccgtgcctaccacctggggtcatgccttcccaaaccatcatggattcttatttcctggaaactgcaagccaaaataaataccttcttccataagtcactttgggatgtggaattttatcacaaccacagaggaactaataccagctattaaaacagaatgggaccatgttggtttgggtagaatatggaagaccttggaaatttagactagaaaagtagttcaatggtaaaagcactgtatgttctagtaagagcctggaagacagaagtgtggagacaaatgtaggtggctgaggcccagctcaagaggtttcagaggagatcactatagcaactgggacagaggctcttcttgtgatgttttggcaaagaatctggtaccttctacccttgtcctaagaacttgctcaaggctaaatttaaaaagcaatggactaatttcttagtgggaggaaatttcaatacaacataatattgaatctgtggcttagtttttattggtttcccctatgcaggcctataaagaaaaggaacaagtaaagggaaaagaaatacaaaatctacattttgaagagaaaaagagcactaggaagatcggtgttgcatccaaggcatgtgctaaaagagaaggtataattatcaaggaaataaatgttaagaagaggcctactttacagtggaacaaagggaagggtaccctcagggcaagaccttacccagcatgtataaatgagctgaaggtgttttcctctctgcaaaagcaactaaacaaaagtaatatgattcaagaggcacaaagtccctcagaagatggtagccaagcatggcagtggtgtccacatggtgctttctttagagtcatggaggattcaaaaatgaagggatacaggatctttctatgtatttttaagagagtccataacactaagtagcatgtgctaggggactcgctgtgtgaacgtcctgagttagaagaccataagaagccattttgtgaagctgtgaaagtgaagcctgggttgcaataagatctcgagattaatgtgggaaattaccaatacagagtcaggtaaaaatacaagggaatttaatagggaaaaagccttacttacagagtgacctagccagccggcagggcagcagtaagtacagcaagccaaagatgaaagtgaaagcagcaccgccacgtgagcgtccctcacccttcaaccttccctaccttaccctgaccatgcccttgcagggcacacctgtagccagcctctaagcaggcatggctacatcatctcctacaattccccttttagtttaaaagaggattaaaacttaacagtgtaaagtatccaaaattaacaatcatataggtgaaatataagaagatacaacaatctgcttatatcaatcctaagtatctattttaactaagccctaaagtcatctgaaagaggtgtccaagcctgaacacctccttccaatcccaacaataaacaataggaagctatccctaactaggtatatacactatcctaagtgacaacaatggggaaaaggggacgtagcattctccaagttacttcctgctgaaatgggacagcaatagccttgtggggtcctatagaaagaaaaggttagtataaagaaagtcttgaatggattgtatccagtccatgttagatgggatttgcttgattgaagatctcacttgaaatcctcaacttgattgaagtcagtacccgaagctctgaccagagtgtcagttgaaatggatccagtgcagtcgaggagatgtggcccattttcattccagggagtccagggattgctgtcaggcaggtcttcattggctgtgggggactcaaacataaatgttagcagagaaatgtttgcttgtgtaattatgtatactgggaaaggcaaccataggagaataacaaatatgagagggtatacaccttgaaagaaagagctgagaaaagacaaagacaatccccaaattcttctcgtattctgtattacatcaattggcttcttgatacaatacagaaactctaaagtttagtgaaacaacgtgcttggattttagaggaggaaagccaaatccacctctaaatccagcattgatttaattgaatagggactaggtaataaagagaaacagagttctctgagagacagctgtaaagtttaccttatggcacgttccttttgtttgacggttatagctaccttctcttcttaagtatgtacccatgtagtgtcctttgacttctggagatgagttttcctgtgaagataagagcaaaacacttccctttcctttgggagatttctatttagtttatgagatatacctttgtagaatacctgtcatttctcctcatcaagaggtttttcctcttcaacttgaatcttgatcaactttgatggtatccaaagtttttcttctcctgtggaaaccaatgcaaaacccttaccccatcgtaacacatgtcctggtttccataaagaggttaggacatctttgaagtataccggctgatccagctcagcagttttttccatagtccagtgtctttctgtagctgtttgtcctttttcattagcattaagaaagtttagtgttgataaagcattatgcaacctaagtttagggagtttagtcttccaagcctgtttatggagcatctcctttagtgtcctattagatctctcaaccactgcttgtcccgcaggattgtgtggtatactggtgacatgctttatgttataatatttgaaaaactgttccaattttgtggagacatatgctggagcattgccagtttttatttgtgcaggtataaccataactcatttgccatcacctctagcaggtgtataataacagaatcagctttttcaaagttaagagcagtagcacattggaaccctgagaatgtgtctatagtatgatgcacatatttcaaatttccaaattctgcaaagtgaaagacatccatctgccaaacctcatttctacgaacacccttaggattatagcccgctgtcaatggagttcgattataaaaggaacaagtaggacagtttctcactatctccttggcttgttgccaagtgatggggaagtcctttttcaaacctttgctatttacatgatgtttcttatgaaattctgtggcttctagcacacttccaattaataaacgatcaatctcatcattgccttgtgctagtgggcctggcagacccatatgggatctgatatgtgtaatgtatataggattacttctgtttatgtttgtttcctgtaattgtataaacaatgaagttaattctgtattatcaggaaagaattctgcagtctcaatttgtaacacgactctctctgcatattgagcatcagtaactatattaagaggttctgtaaaatccacgagtaccatgagaatggtatataattctgccttctgtacagatgtatacagactttgaacgactttacttacctcacctgctttatagcctgccttacctgatttgttggcatcagtgtagaaggtaagaactccagaaatgggagtttgccctttagaatcaaatcagaaatcttttctacatatgtctttaacattttattatgtttatgtggcagaaatatccacttcaatatggtctcttccctctgcatcagaatcccagaagggtattctgtggatggcaagataaccagaatacagtctaaattaaggtttatccaatctacatgcacatccaatattctgttttctacccattgtaattttttttctgcctcagcggataatattctcggactgtttaggtccttatcacctttaagggccatttttaaatgctttcagtcatgtccttccacaccaataatcatctgtagttgagaaatttcccctaataatttctgaagagaattaagagtttgataacgatctcttctaatttgtaccttttgaggtctgattctttgtaagtctatcttgtaacctaaatagttaatagaatctcctctttctgtcttttctggggcaatttgtaacccccatcgaggaagaacttccttcaccatttcaaacatacattccaaagtttccttattagattctgataaaagaatgttatccatgtaatgataaacaagagattgtgaaaatttcttatgaattatttccaaaggttgctgaacaaagtgatgacacaaagtaggactatttagcaaaaccctccactgatatctcctaactagctgtaaattattaagaattagtacagtaaatgcaatcattttcctgtaacggtattgtaaaaaacaaaacaaaacagtcttttagatcaattactatgatcagccatcctttaggtatcaaggaaggaaatggcattccagcctgcagagggcccattggttgaattaccttacttattgctctcaggtctgtcagcattttccacttacctgacttcctttgataacaaatacaggagacttccaagagctggtagattcctctatatgtccagtgtctagctattcctgaactagtctttctaaagcctctagcttctcagaggtcataggccattgtcctacccaaacaggttcatctgtaagccacttcaatggcagtgcctttggctcctctgaaggtctatcatttgtacctagtttctgtacagcctggatggttggtaaccgttttccatagcatcttaccagatcttttctactatctaaagattgtacataattcatatctaacactggaggaatattaatctgagtattccgatactgtaaaagatcatgaccccagagatttacagctatatctgccacatatggtttcagtctccctttctgtccttctggtccaatgcagaccaccgagtgaacactctgtcgaactctagatagagttacaattcctaaaaattgtacatttgcctctctagaggccatttctgaggccaagtcttttgggtaataatagtcacatccaccccagtgtctactaagccagtaataactttattattaattctcactttcaactgacaccttttatcattaatagaagtttgccaaaatatgcgttctcattttgtccattcacatttgattcttcatcattagccaaaataccatctagaacagtattgtttttcacaataggcaaagaactatctattcgtcctgtgggagattgtctcccactgctactgggaatgaccagacctttctctatgtggaagccttcttgagtcccccccccccggaatttcctgaacttaacgggtttccttgcatgtccctggttgatctacattcattggtccagtgtttgcccttaccacatcttctacacaatccagaaggcagtggccttccatatgaggcattgttagaattccttctggcttctcctacccaagcctcagtatcttgcacattatagttaatgttggctgcatgcaaaacccattcttctagtggagctgatctgatctttaaaggcaaaagtattcttttgaatattgggtttgcattttcaggcacacctgtagccagcccctaagcaggcgtggctatagcatcccctacacgaaatgttggagatacaagaagcatggaatatctgccctggagagcttcatacaggaagtggaaccaatcccagagagattattataggcagacagcagagctggaggtatgggccatctaaagctttgatacaagcattccatcttcttaggagagtcagttctcacccttgcctgagtggggaggtctcagtggagacccagtataaagggactagtactgggaaaccatagtgcaggacttccattactctaggcaacagcaagacaaacaagagaaatttgggtgaaggtccagtattgatgatgtaccagaagccagaggccttaaaccagacaaacaacttactggaatgaacatttgcaagtaaaactgtttaggcaaaagggtatactgcgtgacacaccatagctcccaaggccactacaacaaaagaataaatgatagagagatgggaaagatggaggagctaaatgtttttcccttttttctctttttcttttggggggtaagggaggacactacaaggatggagggcatttatggaaggcctgggaaatgagtgggattggagtgtgtggtgtgaaattcccaaagaatcaatgttttttaaatggggaaagtaagtctatgtctcctgttaagatggggaggcagaggcagacccattgaggttgttaactgtaggaatcaatggtgtccttgggcaaggtgcaggttacgtatctcctttccagtatgcttgagactgtaatttttttctgatttcttattttcagattcaaggcatatttgcatatatatatatatatatatcaatacacatttatatgcttatataataaaattgggatcacattctaaattcatttgtgttttatatgtacatacaaatagtctagaggtaattttatgctatatttttagtgcatctgtgttctgactgtggcctgttatgtggaatttttcataatggcatgccatttttctaaaagttttaggtttgagatgcatttcagatcatgcactttcaggttgcgggggcttaacctatagctagtctttaggttcaaaagcagtgagcccaaagttaggtgctactcccacaaacaaacaaacaaacaagagaaggtatgaacccatccaaaagtgagtaaaaggccaggaaagcaggaaggtgcctgagagttgaacaacagatcaacacaagagcaaagtaggaagctagagataaagactgtggggatagatggggaccccagggccctcttcttcactcatgcctgcaagttccattacttagtgctggctaaggcagcattcgtacaccagtgacagtcttatcattctgtggctgtgataaaacatcatgactaaaggcagcctataaaagagaacttttcactgtgtttacagttggggagtattagagtccctgatggtggaaccaaggcacagtggcaggaaaagcagagagctcacaactcaaactgcaagcaggagagagagcatccactagggatggcaagaggcttttgaaacctgaagcatagcctccagatgcacagctcctccaacaggttccacacctcttaatccttcccaaacagctaccaactgggaccaagcagtcaaatgtatgagcctatgaggggggcattctcattcaaaccaccagagcttatcttagttagacaaagaagctaaaattatacaacggaaaaaagaaagcattgtatgattaatgtctctttattcaagaagacagcaaggcaaaacacaggccagagctaggttatagaacccagcaagcgcggccagaacaaaaggggccagggtccccacgtgcagccccttaagaagctcccttacgtcatcccggctttccttcaccacgcccttatgggcgagtcccgggtccacctggtacctgtcccaggactattgggcggggctaggatgtctccctacaaatcatcttcaacaaatagtgctggcataactggatgctgacatgtagaagattgcagatagatacatgtttatcgccatgcacaaaacttaagtccaaataaatcaaagacctcaatataaatccagccacactgaacctcttagaagagaaagtaggtggtaccctcaaaaaaaattggtacaggagactacttcttgaacataacaccagtagcacagacacagagatcaacaattaataaatggtacctcctgaaactgagaagcttctgtaaggcaaaggacacagttggcaagacaaaacggcagcccacagaatgggaaaagatattcaccaaccctacatctgacagagggctgatttccaaaatatacaaagaactcaagaagctagacaccaaaacaccaactaatccaactaaaaagtggggtacagacctaaatagagaattttcaatggaggaatctaaattagctgaaagacacataagaaagtgctcaacatccttagccaccagggaaatgcaaatcaaaacaactttaagattccatcttactcctgtcagaatggctaaaataaaaaataccaatgacagtttatgctggagaggttgtggagaaaggggaacactcctccactgctggtgggaatgccaactcagacagccgctttggaaataagtatggtgattcctcaggaaaatgggaatgagtctaccacaagatccagcaattcctcttttgggcatatacccaaaagaagcacattcatacaacaaggacatctgttcaactatgttcatagcagcattatttgtaatagccagaacctggaagcaacctagatgcccctcaactaaagaatggatagagaaaatgtggtacatttacacagtagagtactactgggggggaggtggaacaatagaatcttgaaattcacaggcaaatggatggaactagaaaccatcctgagtgaggtaacccggtcacaaaaagacaaaaatggtatgtactcactaatacatggattttagacattaaagcaaaggactaccagcctacaatccacaccaccagagaagctaggaaacaaggaggaccctaagagagacatacattgtcccctgaagaagggcaaagggactcttgagctaattgggagcatggggggaggggagagggaactagaagaaatagaagggaagaagaggaggggagaggaggacatgagggagcaggaagatatagtcaggggaagaatagaggagagcaagaaaagaaataccataatagagggagccattataggtttaaagacagctctggcactagggaaatgtccagagatctacaagtttgaccccaacttacaatctaagcagtagtcgagaggccaccttaaatgcccttctgtgataatgagattgatgactaccttatatcaatcctagagccttcattcagtagctgatggaagcagaaacagacacccacagctaaacacttaagtgaactctggaatccagttgcagagagggaggagtgatgagcaaaggggtcaagaccaggctggagaaacccaccgaaacagctgacctgaacaagaggttgctcatggaccccaaactggtagctggaaaaccagcataggactgatccagaccccctgaacgaggatgtcagtttggaggtctgggcaatctatggggcctctggtagtggatcagtatttatccctagtacacatggagggatactctctcagcctagacacatgggggagggtctaggccctgctccaaatgatatgatagactttgaagatccccatggaaggcctcacccttcctggggagcacaaagggcttgggataagggatggggaggggcagaggaggaggagagggagagataactgagactgacatgtaaaagaagcttgtttataatttaaaattgatctaattgcaattataaaacaaatcctgaaaaaaaagcacaatgctgtcacaaggagggaggtatagaacccggtctgttagtgcaactatgatcaccttttctgaaagacaccttcatgcctgttgactggtctttcttgtctgtcttgcagatcttagtgagctttgtccctttagtccccccaatggaaagtgccatttgaacatttacattagtaacattctcttgaggctggtccaggctttaaatttaatttgaatagtcatttatggaaactccttcctgaggacatcacacttgccatcctaaagagcattactgacctagaaaaacaaacaaacaaacaaacaaaaacatcaggctagatagaatttgtatgaaggggagttgagtggatgaagggatcacacacacacacacacacacacacacacacgcacgcacgcacgcacgcacgcacgcacgcacgcacgcacgcacgcacgcacgcacaaagataaataggaaccaagaaaattgcatcccatggtttctgggttttattgtgggcagtgttgtatcaataagtctgtttctgtttgcttggctgcatttggtttctggtcaagttggtgcagtattaaaacacactgcccatgctcactctggcagcctggctggctttggtagagagatgaacattggtatgtgtcactgaatgtgatcagctctttgttcctcttatcccctcttgtccaagctagagaaacacacttccttaagattgattggcaatgccaatttgtaatcttgaaatcttttgatctggcaaaacaaaagcatacctgtttgattctcacttggttctagccaatgctctaaaaagatcagtcgatccccatgccttgttgttcacaggccaactggaactgaacccagctaagacatttagtggatgcaagttacggggcccatatccacatcttttagtaaagcctgatgctcctgttttcaagagtgctgatgtttctaaagagacaagaaagtccgttgtttctgaaacgtttgcagctaccgccagcagtgtaccttagagagtggcaagaaagttttgcatactttttcatactttttaaatttaaaaatgcaacaggctgtgcctttgtatgaagcagtcatcttccaaaatcagcgactttagttgggaatcctcagtgtgctttgagtcctatagtaaggttccggctgtcacctactgccctgttggttgaaacacagttgaagtccaccttcccaaggtcatgatgggaggttacagacaccctcagagcttgctctggaaatgggactacccaaagggagcactgctctgcttcttcctcttgtctcgtcctccattcactgctcatttgtgtttattttttcctcactggggaagaaagatcaacttatcacacatatccttctgaagggtctaaatctttccagaagggccacctctccacccatttatccaagcatacgagttttgttgtggaatgactaatattatttagcttttcctgacttacagaaaatctttctggaccttgggaaggctctcataaagttggatcagaacaataaagttgaatacaaatacatttcttttgtatacacatacattttttgtatacaaataaattgattttgttaatttacatatcccagacacttactatcagatgctaaaaatgtcctcaaaatatttaagtgaaagcacgaataaagatccaaatgtatttgccacttattgaaaaggcctatagccatttaaggagctacctggaaacaatggttgttctttctattcttccctgatggattgaagaggtgggaagtatgagccagagtgtggtgaacccctctaatgctagtgcttggaagactgaggcaggcagagccagagtttgagctaaactgagctaggtagactattgtatctcaaaagaaacaaacgaaacaacaataacaattcaaagaggtctgaattatagagtgtgggtagagttatgagttggggagggacttggagaaagtttgccattgttgaagtattatgttcaaggagaagcttaaatgtaaataaaaagtagtctaaagaattgaaggcaaacataggccatgtacatgtacactaaatttcttgtcagtatgattgaatgcagccaaattatggaagcaacctcaagtgtctaacaggttaaggagtagatatgtagttactgtaaaacataactcagccttgacaaggaattaaagtctggggtgtgctgtgatgtggttgaaccttgaacacatcacacttagtaagtcacatacaagtagacgtgtaccccctggttctagtttcatgaggaaaattgaacagataaattcattaaggtagaaaacaaaacagagtttgcaggagctgggaagttattgtttaacaggtacgggcttctatgtaaggtcttgacagagttctgaagatggatggtggtgacagttacgatactgcgaatgcgcttggcgcctgagtaatctaagatggaatatcaattaaggaattgttctgtcagactggcctataggcaaggctttggggcattttcttgactagtgattgatagaagaggaaccaatccaccccactgtgggtggggctactcctgagcaggtggtcctgggtgttataacaaagaatattgagcaacctatagggagcaagccagtaagcagcactccttcatggtctctacttcagttgttgcctctgggtttctgtcttgagttcctgtctctaggtttctgccctgtttcaattcctgccccaacttcctttcatgatggatgatgagctgtaaaattaaaaaaaaaaaacaaaacttttctcctcaagttgtttttagtcatggtgttttattgtaacagtagaagcctaactaaagcagtccctctgaaatgcctgctttggaatggttaatatggtaaaatttctgctatttgtcctgccatagtttaaaagggtgaggtacaacctcaaaacctgatgttttgatgagctcagggaatggaaggatatgtccataagagacaaaagtctctgactctttctttcattgtgttgtgacgtaatactttggctgcatacagacttggtacaaatcgaagtgctgcttcataccaattgattggtgagcacctttagttgttagagttctttcagagccccagctctcttttgagtaaaatgaaccaacaagaagcaaacactgtaataatattacaagtgtaggatgcttagcacagtggtcaactcaggcaggcctgaaacagttaattcagaggctctcccattctctccccaggacctgcactctcaccatctaagcaccctctcatctttcccatgtccatttctgctttgcaaacatttggtcccctcatccaagactacatcactgatagtgtcctccctggctggctcactcagggagcagatactatggagataactgtccatggatcaggtgtgtgtttgtagagctgtgcagctgtttaaactggagctcatggtcctttctttgtgtctctggtattgcggatgccgcccacacattcctccatcattgtaaagttagaaccagtcaatttcttagaatgtcagttttaccttccttatactaaagcacaaaggagcctcttctctcctgtgtgcctgtggctttctttttaaaagttactatttttagagcaggcagttttaaaagtcaaaagcttctatagcaattataatgaaacccagcattttctttcttactcatccctcctcctgaatctagctatgcagagacaagtatcatcaactcttactgcttttattgttaacatttatcatagtccattttccaaattatataattttactgttctgccttattttttgagttagatattatcaactgacttgttagaattaaatatgagcatttgctcacttaaaatttcttccagctctctagactgcattctccctccttacacctttttaattaagcaacattgggttatattaatagctgatacttacatttttataacaatgtaagtcttgttttcaactgaatcatgcatgttttaatttttgcataatcacttttaatgtcctctataatcttctaactttgaatttttcttataaatccttctaagatattgtatctgaaaatttgttcctgtctccccttccatttgattgacagtttgatggggcatagaattctttaggatttatgagtgctaaattttagggcagttgttgtgttactcaacttctggtgttatgtttgagaagtctaatggcctactgtagctttgtctattatttgttctgactaggttggttttctgagtgttgagatgaccagccttgttactgtctgggtgtcagtagtccctggccatctggaacttgtggctcttactccagtaaactcacatcatccctttgatgatgctcttaattctcctagaccagttttctggttgttatgcatttttcctttttttttcttttttagaactgaagggtgtacagagagacagctgacctgagatcctgggagcacacagactctagacctacagctagggagcctgcatgggactgacctaagccctctgcatgtgggtgacagttatatagcttggtctgtttgtggggccctagcagtgggaccaggatctgtccctggtgcatgagatggattttttagaccattccctatggtagaatgccttgatcagccttgatgcaaggggaggagcttggtcctgcctcaacttgatataccaggctttgttgactcccatgggaggccttaccttttctgtagaatggattggggccatagaagggagggaagagaggaaagaggggagggagaaaactctggttggtatgaaaaataaaaaattaagaaaaaaagaattaatgggtgtctgattttttaactgacctattttagttcagtatttttttatatttatacttgattttgtatttttaactttcaagagtttcttgccctttgaaagttcttttttcatagtgtccagttatttttttaacataggcaatattttataacttaaagatatgagttatatacagtgctttattttgtttttgattttcattttcttttctttcttctattgacacagtttcttctgaagttctctttatccaactcactttgaaattcattttagaatacattgaaatgcttggtctgctgttcatatttaagagtgagaactaaaataatggttaaaactctgtacgagcagagctgtggactaaaagttttttttatacatggttagttcaggacctggccattttagagagactttcatgaactcacgactatagattcttcttccctcctcctctttctcctcctccttctttctcttgttctttcttctttgatcttttgagacagagtttctatctgtaacagccctagctgttctagaactagctcttgtagaccatctggccaagaactcacagagatctgcctgcctccccagtgccaccaccacccgagctgtgtggctcattttcttggtgtatcaaaatttctggtcctctgtgatgtacatttgtattggggaagtgatcaggaatatacactttggctgaaatattctggttaggattgactttctgggggctggagaggtggctcaacagttacaaacacttgttgatcttacagaggacctggattgaattctcagcactcacttgggtggtgtgcaattggctggaaatttagttccaggagatttgacaccttcttctggcctctacagggacctacacactcatggtacacacacacacacacacacacacacacacacacacacacacacacacatgtttgaaaacaagattgatgaaaccatgatggggaaacccacaaaaacagctgacccaagcaagtgggagctcactgaccctggaatgatatctggggaacatgcgtaagaccaaactaggacctctgaatgtgggtgccagttggatggcgtgggcaagttgtggggcctgtagcagtggaaccggtgcttatccctagtgcatgaactgacttcttggaacccattccctatgcaaggataccttactcagcctaggtacagggggaaggaccttggtcctgcctcaagtggtagtgacagtctttgttgattctccatgggaggcttcagcttctcagaggatggatggagggtggggtagatagaaggttgggggagtgggagggagagggaattgagattggtatgtaaaataagattgttccaacaattaaaaaaaaagattgctttaccatgttgattcccagcttgatcatcctacttctatagaaagtctctggtttgtttctttaaagatgtagagctgaagactcctcctgagattagggaatgatctgtgttatgaaaggcatctaagggattttcaatttgttgtgtggatgagagaaggtccaatatgtaaattgtaaaatgcaatgttatatttaggaaagctggaaacaaaatgtagtgtcaactgtagggacaaaatcaagtagatcatggtgcaaccttggcctgatagttggatgataaaataatcattaaaaaaacctgatacatagaaagatgttcataatcaaattcctattatatcatatatagccactctggctgtcttggcactcgctctgtagaccaggctggcctcaaactcacagaaaccagcctgtctctgcctcctgagtgctgggattaaaagcacatgccaccaccacctggcaatatattaaaaaaaattaactgtggaattgttgtcatgatgacatatttggatttataagacaaaagttgtgttaacaagataaatgagacaatatggctctttaaacataaaactaaagagttgtcttttccaaaacctttctcccttgatgtgatgatgtataagattttattcttagttgctctggcctttttcctacctcttgtcagctgtgtggctctttggccaaaataggaggtgaatacagtataagctctgtggcaccaagtgacccagcagcccacagctactacctgtggtaagactggagaaacttgaaggccctgggaccaggataagctactgtgaggagtgagcggaaagaagctacaagcatccttggtaaatatgtatttttattttattgagagtcttagaaaagatggtaaccacatgtcaataactttgaaaatggtctgttgacttttttctgttggtttgtttggtttggcttgttttttcaagacagggtttttcctgtagctttggagcctttcctggaactctctgtagaccaggctgttctcaaattcagagagatccacctgcctctacctcctgagtgttgggattaaaggcattcgccaccactgccgggctaaaaatggcctgttgactcttaagattgtgtgttctctctgtggttctctctcctcccctctctctttaccatcttaatgaagtgtccttacaatcttgaatttcaaagggctttaattaaacttgtcagttgaatttttacagaatgtctgctataagctttttcttactcgacacattgatatgtcattagattgcttaatatttttaatctttctagtgtaacatgaggattatgatttggtcgtggcagattttgcactttttcataccttcaaatttgatttactagcattttctttggaatttttttatttgccttcataagtgataatgatctgtaggttagttgccttttataaatttatgtgaatgagaatgtgtacccatgcatgccatctgtcaatgctaggggcagagcaggatcattttcaccataagtcaaattcggtagctaatctatatttataataagagatttcagtgtttctttcttaataatgtttaagtactagacatggatacctgaagaattttttgtatctttgattatggggtgcattgacctattttcttgtaatatttcatctggttttgtatcaaaataatgtttgattcttgaagtaacttgagaaatattctatgaccttcagttttccagaagatattagacaaacacagtgctatggttttctttactacttggtggggagggctttgaacatcagtctcatgagtatactcatgatacaaaaaaaaaaaaaaaaaaatgatgtccacacagtttgcttgagaaactgaatctgacagttataggtagggagagggcttaggcacaaacacggaggaaaacatattctgattatcaacatcccagaagaaaaaacttttggaaggcttggggagatttgttaacacaggagagaaagtgaccctttctgatgaaaactgcaagaaatgttttcttcatgggaaggctagaagaaggctgtaaccatggccactgaagagtgacacctcctgcctggagcttctcatttagctaaacaaatccatcctggcttcacacatgctttatggagctccaggaattaaattagacagaacatttttaagtgaccggggttttcaatattttggatttcctcctctttgtatgtttaaacattcataaaagaaacagaaatccaaagaaatcattcataatagcactccgtaaagttgctggctgcccacaactctgaagatttgttatatgaacaagtccaatctggacttggtcttctattctgcacctggtgtccagggtatttccttctatgctgttcattgtgttcgagagaacaatatcgcaatgtgatcggattgccacagctgctcacactgagttgccctgcattgcatcagctaccaggataggacagggccaaatgaaaacttagtaaactcaactgtgagaatagtgacgtaagcttatttgaaggtcaaaaccattgcatcttgtagatctgttacagctcatgaaaatatttcctaagagacatgttttctaagagtgtcttttaggatctcctgccctttaagtccaacagagcctgcaaattagtaaagcatgcataccttgctaatgtcaagaactgttatcaacaggaagtcatagtcaaggtctctggaagatttaatggattagggagtaggtgtcactggcttcagtatgaatgacttggctttgttaatgtgggtggcattattttaaccacagaacacctacctgcacagtgattcttactgtaaaccccatgtctgtggtgtcaaacttcagtacagtctctatctgggatgtgaacctgcctaatgtgcacatggcaaataccttttattcaaacagttctgcgggggagagagaactcacatttgagtggtgtgcatctgttttcccatctggccctcataacaactgtgtgaggtgactgagtcagagtttatcattggcttgttgtaagggggagaaatggagacttaatttgccaggattgtaaggcaagcaggaaacaaccaagatcaggacccacagtttccaacctgggctctcgaggttctaccactatggaactttctccagagtgaaaacatagatgttatatagttaagtgtccagtgtgaaagatcaaaacacaccctcatccccaatccaaagtgaaagtcaacattacatccctggagatgggtcattaaatttccctggccagccataggcattgggctgggtttactagagcaggaatctatgcccgacagtggaacaggccttaaatccaatcagaaagcaattggttacctcttccccaaccacaaatcacagaacagtcatactaccattgcacaagtagacacatcttgcctgctaggttgatggtataacacagctgggtaagaccattggtgacaattttcccccagcagcttctcctagcaccatctgcctctctgtacaatgagtagcagggaggaggcctatagctccactctggcttgatttctctgtgtcctctaaccaaagcatgttgtcttccgtgcataaacgggtgcttttcgaaagtttgaattgttacattgtataaaggacacctatattttgcttttacataagatgctaattctgtggttggctctgtccattttggtggaatctcaggacttaaatattgtgtcttaggaataaggaaacagtaatagaaaatttggagttattgagatgtatgaattggaaattcttgtctgagttttgcatgtctttagacttcataggtgggcaggaggagatcctggaccactgacattaaaggtgagtactgtattttagtcatccttctgtatccatcaaggatctatcccaagacccccatcaatacaaattgccatggatggaagcatttctcatatgtttccttaatggtagtacttgaacacaacctatacccatgttccatgtactttaagttatgtcaagattatgggttgtatattcatagcccctaaacaccaagtagaaactttctgagctctgacatggtaccagaagaagaaaacttcacatcatgagccttgttttatatgcaaaaattatcaaggtctttatattaaagatcaccttcaagccatgtgtattagggcacttgaaccacaaatgaacaaacctccctggagtgctcactctcttgggccctatgcttcttgagtgactgaatgtattccgttactgggttgcctggtaagtcccctcactgttctgttaacatgtctgctcaggtctaggactgtggccttgctatggttttcatcagaagccattcaagtaaatttcactgtaggatcatggaggtatgaaggttgaaggattcatctaacaacacacacacacacacacacacacacacacacacacacacacacacacacacacacacacacacactaatccaaaattgtgtttatttcacattgctcttgtctgtttactcagggcacaaatgtccactttggttccatccttttccctgctttatctgattcttcatagaatttgggtccatggataagcccactccccagtttcagctcagagacctccagtaaatataaagatttcccatccctacagcaatatggaaattgccttccccagggacattatgttcccaggccttctgccaaggcaaaagcagataccgttccacctcaatttcactgagtttccaagagcctgagattgcaggcgaaccagtgtgccacttctggtgaattgatgttattaattaggcccattgaaatcgttatctgtttcctaatggagacagttcatagagtgttgggaacgttgtgtctgctgctggagaagagctgcgaggagaactgcacgtagtctctattctcagtactgtccttcctggaggttaccagatccggagatagcatgaggcaggcttgcttttctgagcagaaacaggtactggagctaatgtgtgggaagtggttttctgttttcatgtgctatttgttaacatttggattctaatctgtggcgtgcaggtggcagtttggaaacttagttcatgtcttagcataaataaaataaataaataaatccttcaaactttagattctagggagaccttattttcctagataagtatcctttcttcctttcttccttccttccttccttcctttctttctttctttctttctttctttctttctttctttctttctttttttctttctttctctctttccttcttatttattttccttcttccctttctctttctttctttctttctttctttctttctttcttcttccctttcttatttcttttctttcttttttttaatatcagaagggcatgagctgtcagggcatttgtggcttgtgataagagttgttgttgttacactgtgggcatcttgatgcctgtcttatgaatgcgttcttttctccaccaaggctgtcacgtcgtcctccactgagcatccggctcagtgccttaggaattcccttaactcagaaatgccaggatcccagcctttcctagagaaagcagtttggatggctatctgaagctcttaagagccacatggcttgcagggacatgagaagcatctgggtggacagaaaccactctctaaagccactgtgttataaaagaggcaatatttcccataggaaacaggtctccagaggtggatgtttgagagctggcctggggttttgtcctccaatgaccccatccaaatgtgtccctagaaggacttcagctggaagatagaaaaggactggctgacatgctgaagtccccgtgctgctggtaacaatttgtgctccaggcgctactagattcttcaagattctaactctttttggcttgggagcagcaccattgactttcttccctcaatgcacaaagcattgtcaggtttccctgtctatgtggtttgtgcttgtcatcctttgtcagcatggggccttctcattagtatcttcaggtagagaacacaagtgagacaggacctggatgaagggatatatgtcataccacattatccattcagggaggcatcctgtacacataccttcctcatgtaatatgtgtgaaaaatagctttctgccagccccacccaagctgaggatatcttctagaactactgtcattatcctctaatttataccctggtctgcttgcatccctacaatctactccaaccaaagcatcccgtgcaaaccttttaaaactgggtgtgtttctgctatctcgccccctcattgatatcatcccatcatgttgacattcttgagttctaaccatgattcttgaagctgaccacatttggtccttgatgctttctttcctcccactctacctttggctcctgcaaagccatcttgctttgtctatgatgagtcacacaagctttcactcaggaccttgctccttgcctgatggctttgctccacacttcatctgggttttctgctccaatcaccttcttggagggtgtccttgacatgttatctaaactataactatcattctgtgttccatggtctatttcattttctttcatagctcttgtctccacctggcttaatgtctgttcagttcctggctcccagatagaatgagcatcatgaagggtgtgactttttctgccatggtcttattggctccctgatagcaagaacagtgcttgacccatggggcatgctaagcaaacgaaataaggataacacatgtgacctgtgtgtgtgtgtgtgtgtgtgtgtgtgtgtgtgtgtgtgtaagagtaacttatgaagtgtaagctccatacatcccagcttaatttcattaaaagggttttgcattttgccctaattgatgttccatttagcatctacccatcttgaaactatcctagaacttctatgagactgtcaccactattcctccaaggcccaagggaagaacactatgctagcaaccttacactatcctccactgagtagtttctctcagaaaaaccacaggcctattcatttgggatgagactgagatgaagatttcctttcaataccaaagaactgatcctcagaaaatgtcacatatgtatggatgaaaataaatataggggctggagtgatatctcagcaatttaaaagtatttttatttaatagcttctgaattctttaatagtaattaaactgctgttgcagaggacctgagtttggttcccatcacccatgttgggtggctcctaactgcctgtaactccagttccagtgtaatccaacactggctttgatgggcacctgcactcaaatggatgtacccgcacaagacacacacctacacataattagaaatcatctttttaattaaagaaaataaatataatgactaaaggcttaaagcagacattctgccccactccactcggagctagttattcagccctgaactctctgtgtcttagattataggccagacctgtctactgagcataattaatctagaaggtgtgttagcctcaccctcctgagtgctgtgaggtgtaacctggtctctcccactatgaaacagacctcactgtatggcaaccacttgcattctttagtcagcaggaagtcacatgtgaggctttctgcaaagccagtaagtgcaggacaattaatcttcttgttctttaggaatgcagaaaaggtcatcattgttagtattcaaggagagaattaagaaggaacacttgtaaatgggagattaatacaaaattgtagaccagaaaccagatccctaagtgaatgagaggataagattttttaactttactaaaaaagtagtgatggactggagggatgactcagcagttaagagcactggctgctcttccagaggatctgggttcaattcccggcacatacatggcagctcacaactgtctgtaactccagttccaggagatcttacaccctcgtaccattgcacataaaataaaatttaaaaaattcaatgtaaaaaaaatcatagtcatgatttagggatggtgtaagaatagcagtagttgtcatctgaatgatctactgggcatgtgcggcctctttctgagacacctacgaaggtgggtgtggtagatttcagaagaatttagatggcaggctggtctgtggccacagctagtcaagtggtggaaggcaagttctgtgtgttgtgcctcttgccattcatgaaggactcgctagagtgatgaccttcaatttttccaagattccttccctcccctgcctcctcttccctcccctccctttcttgccccttcctgtctttttggagtttctctatctttctatttacttatctcctcccagagttaatttcaagattttgcagccaatgtaattcaaacactggaggcccatttcttagaaaaggttggtgtgaaataattccaaggctcatgaagattcatccttaccacaaatctatttcaacagaccttggaagagctgatgagacagaaaatgctgagctggctttctctgcttgtcaatgcctgttttatctgccatcctggggcgtcatcccttcaagcaggtgcagccttcctcaggagaaagacctggtccaagaggcttctcgaaaatggctttgactttgcttctttcatggaaaggacagggatgggtggtgtgggaagataactaatacactgttacttatagtgaggtcctactgtccttctcagtgtgacaagagaggggtcatcttagcctgagcagttcagatctggatgattctttaaagggcgattgagtcattcttagttattcagctgagccaagaaggaagatttgagaaaatgttttttcccaaaagatctctagaagaagtagacttgcaacagttctctcaaaaataaatttttatttagataaatgtacaattcatttagagaaaaataattatctaaaggtcagcaggactggatgtgttccaatgtgtctctacaacagtgacaatcctaaggcaatggtcaggttgtatgcatgagcctcccaaggcatcacatgctcttaaatcctatcgttagtatcaagtgtgatgtttagaagaggcaagacagttttgtgagaaccagtcattttgttcaaaaacattcttttctccccaagtgtacgtgtaaattgagatcagttttgaagtcacagcaccatcattccgtgaactgccttggaaactgagaattactgtgtggtagcatgctttctcctgctatgctctgctagggaatgacatcatgtctccaagttcctgtaccaaatctgtatctttttgtttaaagctatcccttgatggctaccaagtccagcatcttgaagatgtggctttagctaattatactgtgttgttctggtaccatattcatggtaccatgtcaactctatagttgcacataccatcatgctggataggcaatctaaaacaactgagaaactgcagacatgctctacaatttgtaggaaaggagattcagcaaacatccaatgtgatatgcagcttaacagggacagcaccctctcccgagaccatggcagtgtatttagtttggaatctcacatggtttatagccttagctttcacatatgcagaaggaagatgcttgcctaagggttactgtgaggatctaagaagaggtgagaacacttatttagcataacattaagcatatggtaagaactgaagggtcactaaaaacacttagccatttaaagccactctgcaggtgccaatccgtgttttcatgtcctagtagaagcagttaaagaccgaggcagacccatagataccagctatgattctgaggtttaaaccatattgtcctttaagccttttcatctgtatgaggtcaaatccttcctgaacttcagactttggtgtgagggggaaaaacgattcactgtgaatggctcttgttattcaatgagtgaaactgcctgaaatggtcactgggaaagccccttactggttctcaggctgtgtcccaacacatactgacagtgatagtcagtacgtttacctgtacacaccaaatgccagacactgtgctgagcgctcggactccactgttgtttccatccctttgctccagtgcatccctatcatccccatacttcagcgatggtccctgacttgcccaagctagcacactggggacagaaatgcatgctattgagatgatttgatgaactccaaacacacaagtccagccgcccatctgtgtttgtccccaagcacagccaagaaaaaagccattcttgagatatcccagagttcctgccgagcccatgctccccacgctcaccctgtctcatacttgtgccagggtccacacagggacactgaaatgctctctgggtttgtggtcccacttcattcctgtttattggatgaaccaggttcagaaacactaaacagattgaagtgaccctgtaaagagatgggagatgtgatcacaaacctcgatttaggactccctactaactactttcagcttttcattggtgaaggtagatgggaatgagattcccacaaaaatagtgggtattaatcctttctgtgaagcacttgtgagctagaacctctgtgaacaaacaaacaacaacaaaaccccaacaatgactgtctcatcttctaagtcatctcctttctccttgacaacaagacaccttcccagacttttttttcccatttctgtaatttgcccagttgaagggtctaggatatggctgaaataggggcacaattctcagtctctccaaagagggccaaacacagacttagaaacaaagggctcaaagttctggattaggagtagttttgttttgttcttgattctaagtaagcaaagtgtctgtgatttttttgttttgccacaagagaaaaaagacgcatgccattcattgttcatttgggtctacgggaatatactgctgcagtaggaaagactttactaggtaagaatgctaggaaatcaattctgtttaactacatgatacacagaaagcccaccagtatcttagctggatttcttcaccaaggtctacaaatctattgatttgtctaccctttgaagatattcctcaagttccttgaggtcccacttactgttgcctcctgtgacaggctggtctaattataaatatcacttctaagaatttaatgtttcatatttcacctcttaatgaattatccactccattaaactctagagatacagccaattacatcaacccatctcacatatagttcttaagatgttgttcgggtgataaatgtcagggttcttatcccttgtgaattatccagtactggtgtcaacagacaactaacaactctagcaaaactcagcaatgctatatcaatatttaagcactcatttacaaaaatgactttgtatcttttaaaatacggtaagctctatctagttgttgggtttttgcagaggagacaagatttataaaacgaccttctctgttttagatgctagcttagccatttcatcccccaaggaatcagtgcccatctcacagtggagttaccagagcatcttgtctgtgccttaagccttgcatttttcttcacttgtaggcatcttgacacttcagagtacgggtgtgatggccaatgtgatggaaaactcacaaaactcctcccctggcacagtatcactttccatatccaactccttatctgttctccacacagagtcccacaagttccccataggcaaaacatgtctccatgcccaatgctatagactgacaatgtgtcaaatacattacaattatagtcctcatgaagccacattagaatactttttgtcaaactataggttatatcagaactacatgaaaagtttgtgaaaactcagtttcctggtccccattactggggtttctgattaagtaggtttggggtgaggcccaagaatcttggtttctgttaagttcctagtagctgatgctgctgttcctggagcattctgagaactgaaatttagactgttcaacaacgatgctgcctagcatccttcctacccatcttcatggtaagacaagtcaggctcttcttgcaagaataaacccttcaccatgccgtagaaggcacttgtctttgacctacaataatgacagaacatggacaacaaagcatgagaacttgaaggaatcttagcaagtgtttctagatcactgtggaaaaaaataggaaaaaggaaccttctgtgagcaaaaggaattctgggaagacagtgtcttttataaaataagaaatatgtgggctgggtgttgtactgcagacatgtaatcctagaagttgggaagttgaggcaggaacattgcaagcttgaggccaagaaggaaggaaggaataaaggaaggaaggaaggaaggaagaaaggaaggaaggaaggaagggaagatgataaatttgggggaacaaatattaaatggtacacatttctttagttagtacttggttgaaaaagatactacccaattatgggctaggtatacaacagcaagagctatatctcagatgtctagaacatttggtgatacacaggctgttcccagtccatcttagaggaataatcaaaaccatggttaagctgtgtgttttaattttttttagcacttgaaaaaaatgtacagtagtttgaagtcagtctttgcaaacctccacagaggtcaaagatttcatttatacgtacaaaattagtttacaaattttttttggcaatttcatcttagtaacccgttttatcctattgccattgtcccaaccattgaaaaagtttacaataatttacatagaaatatcttcaaagtgcttaagaatagtgattgttctctgggatatgtacaggtggcctatacaatgtatgtacaggtgagagtcactatagcacaaggttcattcctggaatatggctttctagggaaagtgcatatttggccagagatggcaatactgtctagagagtcaagggttacagatacttggtaacccacatccaaagctgaagtagaatgtggccaagaatatttacaaaagtaatataaaaatggtcaagcacacaaacttgatccacggaaagatatcttgatgttcttccagatgggaggaagaaaggagacttcagcgtgggctcggttatcgttctggagtgggtgttactggttcagacctcagcagtcaagacttgttcagaggtcaagccagatcatcatctgtgctgacaactgatatctgcagagaagaaaaggttcccatgagcttggtggtttctcgctgttagcagctaagagcggactttgagttggccattcacagacccaacaaattggaggctagacacatgaattgtatttgtgtcctcagcctgaaaatctgaaacccaaaaggggtcctaaatctgaaattttatgagtagcattatgacactctaagtagaaaattccatgcttttctttatgttactggttgtggtcaaaatgaacacacattaaaatattatgtaaagtatcttaggctatgtatataagaatacatgaaacaaatggattttgggttcacactttttatgtatgcaaaaacccccaaaatccatgctccccccttccaaaattccctaaccctgaaaacttctggcaccaagtatttcaaataaggaatacataatctgtacctgcttgctaggagaaacaaacatacaaacaaacagtgtgactggctctgtttaagaagtgtaaatcttggaaacaaatgtcaagacatataacgtgaactgaacactatttcatgtttccctgcagaacttgcaatggcagtgttaagcacatttcattcaccatggtcctgaagtagaggccaaatatgcacttgggttttgaggggaagaacaagggattacagttgctgctcctgcagaaagctggctctcctgggtgggatggaacacctctctaatgaaagcatttagtactttaggctagttgaatctcactcaagctatattgactttcagttaactcccttatacacaatcctcatatgcccaccctgatttacctttagctacccagtatgcaaggagctgaagtttaaaaacaagctattggctcatactgctattcacatgtcatttttataatctgaaataatgacaaacaggacttacctgccttcctctgtgagtgagatacttatcactgactgacatttagcttctaacatgtagccagtggataaagtatctgggaacttcatgatccttcccagcccaggtacccatagctagaggttctggtctcctttgcagagactcatgtcaagccacagtgaatacagacaatgcagacttactgctgggtatgtgtgtccgacagaagcactgtgtctaccaatgtctattgagaggtcctcttcagtggtctttaagtacacaggattgtcaaagttcatgcttttcatgtttttatgttgccaattccgccacatcaagtacccacctactgctgccatcaccaagagcactgaaacagaaatcataagtgaagtctaatagtcatggatctatggtaatttgcattaataaatgttccatgttttagggagcttggatagatggaagttggaatccaaatgagagaaaattttgaaaataagttcaggttgtatgaatatttgcattggagctttacacacccaggggtgtgcagagtcctgagtcctaaccctaggccaacttcatgaacattacagaagccttggagtgccagtcaagtggttctggtgtgttaggtaaaccagtaagttaggccaaagaggcatttaaatcaaagtgccatagaattcgcatgcctgaaagtggctttagaggtcctttcacctgagtttggaaatctttaattactttaaatttaccctttatgactggacagtggtggtgcatgctaattccagcactcagaggccgaggtaggtgggtctctgtggttttgaggccagactgttctacagaggtagtgccaggcctccacaaagaaaccctgtcttgaaaaaccaaaaaccaaaacaaacaacaatatgcccccccaaccaatatactttatgaattttccaactctttcaaaatgtcatttgaccatttgtttgcctattttttttaagattttatttatttattatgtatacaacattctgtttccatgtatatcggcacaccagtagaggccaccagatctcattacagttggttgtgagccaccatgtggttgctgggaattgaactcaggacttctggaagagtagctggtgctcttaacctctgagccatctctccagacccatttgtttgcctctttgtgaatcatcatatacaacaaatgggactagaacaaaactcttgctaaagggacatcctccatgtagggataagcaaggctaacaagcttgacgcagaaagcagtaagacctgtaggcaattggtgaatattcaccagtgtccattgtcatgtgaaagttaccagtgatgagtaagtaccagagagttgagggagtgaatgcaagtctcatgtgttatgacagcataggagatcatgggaaggagctgtatatgaactggaactgtctatgaggtatacatgagaagtaaattcacttacagagaggaaggatggcccaggcagctgaagttccttttgggggaacactgatctctgatactgctgtggtcacattgatccctgcaaggacatacaaggaatcagtctatcagaatttgaattaagacctagaaatctacctattaggtagagatccacacacctttgtacctaatattgatctctagtagacactataattccacaccagaagaacttgggattagaattatttgagttacatggccatttcaccaacaggtttaaatgagtcagaaaaatccaggatatgcaggttccaaagtctttggactttaggcacaagtagccagttggggcagagccagtagttaaaggctgcattaattatttaagcggcagttagttgagattaagtttgcagtactggacccaatacctccaggaaccagtccactagtacgtagaatgtctgttgtgttgatatcttttgtctcagtgtaagtcacaggagttgaagtacctggattataaaaaccaagaacctggttaaggctaaggttcctgaatggctggccacatagtccagagaagtcatgatgaaaggttattttaagtccaggtaaaagagtcaacccactgcagaactaggccataaagtggatgtatctgaatggagagaaatagccagtttcgagcaaaaactagaaacatttggaagttcaggcagggcaggcagcatgtggaagctgacaactcaagaagagccatagccacattgattctctgtacaaaactccaggctcctgggtgaccacagatgttcttgaaaatgccttgtgtgccatgcacatcaagtgcttttgcacctattttctcagtaaactgagtaagtgcctattatggggcagaatgatgctaaataagacatcactatgtgagctccttgtttacaatcagcacgtttaactcactgctcaaaggctgataacaaaatcctacaattcaagtccagactatctgagagcttaaacttgtatcatctactgaggtcagcaaatattctacaaccacggtctccttcctcaaatgtcttcagagtattcattatgccctctgtggaggactttaagtacctgcaaattggctatatcagggtgttacagagcaatgggtacaaactagtgtgtggcacattgacacttcagtcactgataaactcatttgatgttgaaatgggcacatgtcagctccaaagtagtgatataaatgcctgccataaaacagtaacactaataactataatgttctgaaattgatttcaaaggtaactacaagagaatttctgaaaccgagacaagttgtcatagccactgccttacagggcttgttatatgtcttgcttgtggctgaaatgtagaaagccttactttggcactctcgtccattttcctcaaggctgtacccgttgggacaggaacaggtatatttcggagagtggtcattaatctgtggtgctggtaggcagaggtattcacatcccccattctgcacatcttcttcacaccagtttttacctagtcaggaaaaaaaaaagggcctttagaataggcattgcaatgttatctatagtctccatggagctaagttttgtctacactgtcaatcttccaagtgagactaacagtcttgaagaatgtatatcactaatgttggatgggtatcagtcaatgcattggaagcacacactaaagataaccagatttagaggtttcttggaagtagattaagagttgtatcttccataggttggtgtgaagggatgtgagggaccaggcctggctcacactgcttgttcaaagcttagagtgaaggctcagaaggagacaagtcacattttcttgactttatattgactaacttcagtggaagggaactcagccacaccacagggaggtgtgagggtctcattaggtaggtgagccggtgttctgggcaggaaaaacatgactagatacatttgatgatttgctaaaccctatataagatatgccatgggggagaataggtgctactggttgtgtctctataaaatttgcacactgaagtcttaactgccaatatcttagaatgcgaccttatttgtagatatagtattgacagaggtaatcaagttcagatgaggtctttagggaggtcttaaccccaaatgtccagtgtcctcagaagatgaaatatgagcacaagcacatatcaaaaaatgggggaaatggccatcttcaagtccagaagagaggtctgggatagagtctttcctcacgttcccaaaggaaaccaacttaccaaaccttgagtttggattttttttttgtttctagaattgtgagatagtaaatttctgttgtttaaggcacccaatttgtggtactttgctacagcaaacctagacaactaatcgtaaggagtatctgtggcctgaaggctactgtggaagctggtacaataggcttagcaatggggacccaggagaaattgagatgaaagcttgccactgagggttaaaaagagctaagagctgactttgaagccatttctccaagatggctggaatgagatatcagacatcaagtgtggagtttggcctagagttcaagaggacaaaggttccattttaaaggaagttgagtagctaaggagccagtaggtagtgggttctagatcatactattgctttagcatgatcattaaggagtaggtttcttcacattacctgatggctgaacgagttcatggtagacaatgatgtcttgggcatcattgaggttgttgactagagtagccagctctgacccagtgaatttattggcaccatacactgcttcattttctccatctatccagtagacacgatcctaaaacagaatcctgacaattagcatgtacatccaagatagacacaaatcaagtcctaataggatttgctcgccatttaatggggtgagattattgaatgtttctctgggacattgagtatgaagggtaagggaagcaagttcaggtttcttgaagttccttgaggacttagtgtctattatgtaccagttatctattgttccttcctcttcccacacacctgttctaaaagtgtctgattagatgtgagccgaacgtcttacctcaaatattgtgagtgcaagaggatgagctaggaattccagagacttgagcactattctccgatcttggccatccaagtccacactagatagcatgtgcagcttggaatcgagccagtagaggcggcttttgacaaggtctaggcaagaaaataattggcataatatgagctgttgctgctctggcttttatttaaaactacctaaagaatctattctattttacagtttcttctctattgggagttcttagtgggacaccataatacttgtgaggccagcaatagaacctgtaactaacttcattctctctgcggggtccaatgtgatttctaagactctcaaagtcattgacttgggatatgttacattatagaaggtgcttttaaacaggcttggattttgcacttcttcccagataattcagaaggaaacagatataacagttataagttgccacctaggcaaggctaagacacccagttggaaatgcattccatttgaaaaatccccccaaatcaaagattcactgagtttccattgcatattagaccaactagataacaagccagctatcctggcacctgtaatttgttaagtccaccctgtttgttcagcccctctctccagctacagatggaactaaaagtatcatctcaaatgtacagtgggcatatatttaaacatgatcaaactaattaactaattaaactaattagggagaaggacatacataccaagtgtaattccattaggccattggatgtcatcagtcaccagtgggcgcctgtcaaatccattcatccctgctttttctattttagctggctcgccccagtcggaccagtaaacaaagctaggggagttaaatcagaaatgtgccttagtggctgagaagaaagaaagctgtgacttaaatcaaaggcttaaagagggcaccaaactcttgagtttcaggcttttaagacagatcctgatgcttaaggctctaattctgttctgagcacatgaaattgaacagtgagaatatacaaggcttggaggcacagctcagtggtagagctcttggccaccatctgtgaggctctgggtctactcttcaggactacaggagacagtaatgtaacttccatattttcattcaagtgtatcatgtacacaagggagttttatttaaccataaagaagaaagaaatcatgtcattttcatgaaaatggaggcaactggaggtgatcatattagacacagtaagactccaagaaatatcacatcttttctcctacttgtagatcctggattttatagataagtaaagtgtgtgtgtgtgtgtgtgagagagagagagagagagagagagagagagagagagagagagagagacatgagataagggaagaaagggagttagctggagggggtaaagagaaatgtgtgagggaggggctagacaatgaacattgccattgatgtcttgaaatggataattctgtttctcaagaatgcatgagaaaagcttccaacctatgtgtctagcacccaaaaggctaagtgaaggaaaacgaagaatacaaacccagacaatgggtccacagctatggaggcaggctctcgcaagtcagagttaaacaggaacttcctcttggctccgtctagagtagctactgaaatagtcttagaagccgcatcagtccagtagatggtcttgtacacccaatcaacagcaatggctgcaggattatagacattgtcgatcattttaaaatgtctaccaaccttgtcatcaattgaggcactgaaacagaataggtcacaagaaatttaaaagttgtcacctttggaccctggagaatggactttctgcttataaaatggtcaaagactttactcagaaagattataggaaccccatagctcagcactgaaattattcagccatgttgcttggggatggaaaattagcaatattgtagcctatctaattgtggttatgtaatctagatgcaagaaaagcatttgactcagaagctattatcccaggtctacagttctacactgaggaaaagctactaccatcatttctatttgtagcaagagaagacagttgacaactatagaagaagagacattatgaggagttcagatgtcatctgaaggcatagtcaccttttactttacggccaatgattcattcctaaataacagctgatggtaatttaatagtgttggatttaatactcccaactaactagctggtagactggaactagagacaagagacaccccactccctaccccaatcttttccacaggcccgatgatagtggctttatgtccagatgtcaggaatgcaagtgaaagttacctgaagatggccttttggcttagatcagcccaaaatagcttctgagctgcaatgtcagcatctagagccaccgtgtttcttagttgttctacaagctggatgtattccttcctctctaagccaatcttcctgatgtctctccgattagtgaagatcagacttggctctttgcctataagatataagacaggttgatttagttttgctgtaaagcaagatcttcaatgtcacctcttcacagaggaacacttctaaaaatactgctgaacatctcagtagtacccagcctggagttcaagccccatgatcctgtaagtacttctaccctatttaggaaggcagtcctgggattacagcactcaacagtagggtggctgataaacaagttattttattttatttttgctttgtgctcagtttcagaagcagaaaggaagcaaatatggcgactgtcctagtatcctatgcaaaaggaaagaccaagacagatgcataggaagctagtctgtgttaagctatcctgatgaactaggagattagtagcattgctctggggtgtgactttttgtgtaggctgactgctacagtcaccggctgtaccttttagaatcactaacgcataaaggtaccagaaccacaccagcccaagtccatttacctactgccttgcacacgccagtggcaaggtccatttgatagccacgactacattcacacttgtaaccgccttttaagttgatacaaatttgactgcagatccccggattttggcattcatcaatatctaggagggaaattcgaattagtcttgctgtgtctctgccttactagatgcatgttgccctttcccatgtcttccaggggccaggctccttgcttcaactcacctccacaggttttcctatctatcagttcaaacccagctgcgcagtcacattcatagcctataactaggtctttgcagatatgggaacagccaccgttattgaccaagcattcattgacatctggaataaaagcatagaaaaagtcacctggcagtttattctttgtttttaatataatattttagatttagtctatgagacttccatatagagatacaatgtattttgatcatatctatcgccccattccccatccaactctgaagatggtacacaaacatctccctcccaacttcaagtgctcattttgtttcctattttataacccagggtccaaattagtatgacatcttattcttaattgatagtggtcttattcacatttaagcgtaggctgctgatggccttgctaagatctgattatttgttttgtaaataaatatctcaggctgaatgataggctactagttagtcatgccggatttacttgttttgctattatttttagttatcttaaggggttcctaaaatcagggttaatttgtcactgggtagaatcccatgtcgtaacactatcatcaagcttacattaatttgagttcattctgaattcaatggaccatcaagcagggtcccaacagcattagctccgatggattgaatggaacctcccagctcccagccccggcctcaagcaagccccacacttactgcattccttcaggggctcatcactccagtcactgcagtcctgctcctggtcacacactttgctaatgtctatgcattctccacttctgcacttgaactttccagggcccaagcactgattgactataaaaccaaacacgggagagaagttccgttgttggtctgaccagagaaaccaatggtccaccagagcatgccggggagaacctcaccgtttttgcagttgacttcatcagagccgtccacacagtctcggatgccattgcattgtctgctgccatggatgcagctgccatcttcacattcaaactggtcaggtctgcaggttcgggaggctgtgaaagcaggcaacacaatggaatgaagccggccagatggtccccagtcaagacatgggcgagaactggaaagttacttacggcagttgacctcgtcactgccatccttgcagtcaggatctccgtcacaccgccattttttgtgaatgcactcgccagagccgcactggatctcgctggcaggacatttcatatgtatcactggctggcggccacactgttcaagagactcatccgactggtccgaacagtctgcatcatcatcacacacccagctgagggggatgcaggaagaggtgctgcactggaattcgtgggcgccgcaggttggtggtgcacagtccagctcatcgctgccatcatcacagtcatcctggccattgcacacaaagttcctggagacacagcggccactggagcaagtgaactcatcagcactacatgttatgttgcctgttagagggaagatgttccattgaaagtgcatcagcatttttttttttaattcaagactctcatcaccaaatcaatatattgatctccgatgattgattttagctttctaacttaaaagctgtagtgctgttatatggagagcaagtttctgaaatatgacaaaacagtttcacggtataaaataagatgcagccatactatgtataagagcagaaataaaggaccaagaaaacagtagaaggctagaaactaatttgagatgagaaccacaactgacacttaaagggacagtgaccaatagcgtaagctggtaccagggacttcttttgggaaggcagagttatacccagaccaacctgttgtatgtcagcccaaatcacatcactagctgagaatatgcatcagctatacgtgggcaagatataatggatattaaggcactatccgaaaagaaacaaaccatagaacagtgcacatggttcctttcttttgggtcttttaaataaatattaggaataggaataccatcttcgtaattttcagggttttttttttttccattactaggaccagaatcacagcctagcaactctgcatgctagtgatgacaaggtagtcacagtagccagtttaggttttgatttaaattcctgccaaacataccaaagtcacaatttgttgctaattgataaaaggagaccacgactctcttgggaagcaaagtgtagatttgcaagggaaatgttttgcagctccagggcttgccatggcaatgtatgaagctcaattctatgactgaacatgaaactcattggactaggtgcagtggtattgcccccactaagtgacttgtacaggccaggctagtgtttcacctgcaaggaccctgagctccagactagtattttacctgcaacgaccctgagtttctgattagtgtttcatctgcaaggaccctgaactcccttggccactattgcagcctgaagttaggcctatcagactcagatttagacgcacttcaaagcaatgtttttcaaccttcagattttccctagggcctcaccttttatatggaacacttcattatagacactccaagaatataagtatgaaagaggaggaaagagggctagcattcagagacaggaatcatcataggccacaaaggttaggtagactttaggtatctattggcaacaggttagatcacatttctatgctaatgtaaccatagattctagttggcagaaatgcttatgtcacactcaggtaacttattccaagaagctaatctaactaaacctttgaatgtctctgctggccccatcaccttctagttctattgagccaaatgtaaggaaggcccaggaattactgtcataaaagaaaaaagcccacatagctgctgccttaacaaggtatgctaaatgtactatgctgaatataagcacaaagatgattccctgcttgcttctatctgcctagaggatgcaccaggcagtgaccaattaccagcaaaaggcctttacagttttatggtggttaggaggaccaacattgagcagacagcaaagctactgaaaagtgactcagtggcaatctgtcttctggcttaagttagcatcccttgcccacctttttttaggaaaagggtctttggggtatgctacttcacactggtcttcttaccacagttttcttcatcttctccattgtcacaatcattttcaccatcgcatctccaggacactgggatacactgagtagaacgggcgccacagctgatttcatttatgcggcatgttctcatatctgttgatgacatacagtctcaaaagagcctccaaactggtcagtgcaaagctgctgctcccgtgctgcctggaagtgcaacacctgggactcagtggtcaggtacatggggcacactgactagtggaagccaggcagatccttcgccagctccgtccttagaagctatgccaagcaaggccacctggcagggtacccgagaaccttgaccatgtcactccttcaaggttctgcggcatgctcagttctggcttttgttttacttggcacagtcaagttgatttgttggcctgctcctagtccattacttatgtttggatatcagtgggcacaccagatattgtcacccaatcctgactctattaaaggtcaggtgggcgaaaacctataagaccttccatgaaatcgtagccttcctaggcctccattcacatgtttctttatacatgcaaagcaggaatgacaacatgatttttaccatgtcattaaccgctgaaacatggtgctgaatctgtgtagatcctgtctaggaccctcaggtttctaactcactgacaaaattgttcacttctttctagaaaatgcgagttccaccgtggtcatttgaataattgtatccttaacctaaatttggtttgtgtcaatcctatttcttctgcgtcagcaggcctctactgcaatgagtctctagacttttctgcaccttaacactcaaatgatccctgtttattagattacatcactcctttctcctgtggttttgggacttccccctgcatactagcctatgggcagagagatgtagttgtacttttatgaagtttttcttattcagtagcaaactctatggcccccacgttaggttacacatttgttaaaaattcctaaatgaccctgttactaattgtcttgctgtttttataatagcatgttttcatgatttgaacatctgtgcatttcaaagcttatgtgtgaccttcaggaaaccttcacatgttgacttaaattccaggattaggggaccatctactcaggtattgtcaaacagttgaaatctatgcacctagtcaaggagttcttaattgaatatgctggcgtcagtcttaagtattcaatggcgaagctacccaagagaatgtcagtcttgttagactagagagagcagtctttaaaggagatggaataactgttaatagcttgaatgaccttcaagtcagttggcctcaagttcaaggcaggcaaagaaaaattaatgccaagcaattgataaagcatcacttagaacagagacagaacagcacgaaagaggtcaagtccaaagcaagtcaaggcacactcacggcactgttctgggctttcatcagaaccatcttcacagtcagggtccccatcgcactgccatctgttaggaacacactgaccatttttgcacacgaagtcagactcggcacatgtcttctttactacaagagtttattctctgaattagaattgaagtcaattgccccagaccccaactttcatattagggtaaaaactatattttggtatgttttcctttaaaattaatgcagaatcagttggctgatactcaattgttggcatctagggagactttagaaaactccattttttcccctcatagtttcagagcagggagatatttattggagatacttagaggacaataaagtcaagggaagacaaatgctgtccactgtcttatgacctagggacatcttaaaataaacttgtcagtttacagtgttaacaccatggatttcttctaactcattcacaaactctgaggtgtttttctccaagtccattttctgtccctaaaatggaaccctcgagagtgggcaatttataaaggaaagaaacttctttcatctcaaggttctgaatgctgggaatcctaagggcacaccattaacacctgcttagtttggggtgaggagcttgtgccttgcttcctagcccaccctctttgtaattgatctggtccaggagaaaggatttattccctctcactgatctaatcacttcttaagtgtcctaacacctctccacaccatactattcaaaatcacacttcatcatgagctccacaggagacaaaccacagaaaagattctaacaaccaaacactccatcctatgactggcccttggataactgtttgcggtggagtggatatgtgtgtcttaataaacttcgtatcctgaaatccctacagtgatatactaggagggaggactttgggagtcgattaggccatgagaatggagccttcacaagtgggattggtacccctattagaaacattagtgcctgtttgcacttgctctctttttctctcaacctacctctcctttctccctctccttcactctttccttttttcccctctccctctctctcaccctttccctctctttctccttctcccgctttctcccactctctcttcatttccccctcgctgtccccctctatccctctcctgccctctctctcactctcctctaccatggaggacccagaaagaaagcagccatctgaaactcagaagtagggcttttatcagacaccaggtctgtcactgcttactttggggacttcctaacgcccagaacactaaaatcagatttgcatcatttaaggccccctccatatggtatttttgtcacaggggtgtaaaccaagactgttgcagggacattcttcacaatatatgtacttagtgcagaggtgtactgaggctttggaactgaatactgccactctgatgggtctgctggggcaaaggaactcatctgctagacaaacttaaagccaattataacacttacaacaagtggtagaacttggaattcaaagagatttcagtcttcagccaaggtttggtttgacatcaaccaactgaaagtcactgaacctgccagtattatggcccataattcacagctacctttcaaatagcctaaggcaaaatatcaattccactactaattcttcctagggcaggacttagagtcacaatacaatgtgacatccattcattagaccaggaaagtaaaaacaaacaaaccgaggcagcttggtcacagtacccatgaaggagtcccagaatctggaagtcttgccaaagcagccagagaagacacccacactgtgtgattgtctttttagacagattcctccatacctctgtgtctatactttctgcttaaacatccattttaaagcatccttctaatcaatagtctgtgtttataaatcagtttgtgtttataaagcctgcagtgtgctgcaaatttaaaagagatcccttggcatgtggggtttaaactaggtagaggttttcgaggatagggcttactcttaagccactctcatttagcttttaaacttgggagatagtcagtttgtaacattcaatgtgggttgatgaattatgatggtcctttagggattattcatatccttgaactacatagctaaggaaccatggaaagccatgccagctcataaattcacccctgtttctaaatcaccattatacagtgttaacacagcaaatgctatacaaggctggtgttctcctgagcccatatggaaacagtgaccaggctatagggcttgctgctgtaattcaacccatgatcacctctgtaagttgcaaaagagagaacaggagaatggccacaaagaaagaagatggttttgcaaagtggaaaatctcatgatgatatgaaagatgagccatgcaacagagagtctgagcaaagataaaaaggacacaacttcacagagtcgtctttctcagctctgaacgtcccgacaagggcaaagaaaagacgcttgaatcacacacagacacgcagataccaagagttccactggggagggaagccataagatacttactttgggaactcacagaagcaaatgacatatggaatgtacaatcaaattgattatactagttgtcaagctcaaaagtgagtcctcccaaaagttataaccaagtataggttgaaggttagatggggaagttaggtaaatgtatagtttttcctctgtttcaaatactcttttgttttgttttgtttgtttttgagacagggtttctctgtgtagctttgcagatcaggctggcctggaactcatagagatctgcctgtctctgcctactgagtgctgagtccaagggtgtgagccaccacttccgagcaatagatcttttgtttttttgtgttttgtgttttgttttgttttcttttttgagacagggtttctctgtagctttgggcactgtcctggaactcactcagactaagctggtcttgaactcacagaaatccaaatgcctctgctgggattaaaggcatgggtcaccaccaccctcaaatactcagataagtgctttgagtacacttgcactttccctgcttaacctccacaccagggatccagcaagaaatctgcccatcaatgtgtttaatttatcccacctcaaatgatgttgcatcactgtgctgttcatccacctctttcccttgcccaagcccttctaccatggagctggtcaacagtatttatgcagaaaggatttaagaaaatccagtcattgctccccctatgactcaggtgtctctgctgacttagataataaaaccttctataacaggttttatacaggtagtgtaaacataggtgggggttggggatggctgtggtctgatgcatgatttcttggtagccttgtcccttacaaccagagaacagctgaaaacaggtcctcctagtgagatatggaccgagagaactgtattctctgggcaacctggaaacagcagggaactcagtgtttcgtggagcagatggaagtctttacattaaaagcacatgatggaaaatgatagtacaggagaacattcttggtctcgagactgagggtaagctttttcagaatggcctttcagatctgtcactgtcacttgggtattgcatttgaatgatgataaataggaaagcaggcaatggcataatgaacatggcagtcaataagactccacgtggcctttatttttcttctgatcccaagtgtcgggatctgcatgggtctccaacccagcattgtatgtaccatctttcaaaaaggcaaatgacagtggacacactaatcttgccactcatcattgctctgggatgtttataatttggaacagagggatgaaaaggtaaacctcagctagaatccaaggtctatggaagcttgacatacagattttggctattctctgtgacatgaggttatggggcctacacacacaggcatttctcacaatgaatgaccttttgatagtttctgatcaatgctatgctgttatatttgcattagtttgggaagagaatgttttctactctgcctaatgctttcgaataagcaagtatgagcagagaattaacagaatccttatctgatctttgacatgtgctggcttgtcatttccatgccagagttagtggacttctgaaacttcaggggattttatagcttgctattttcttggatccaatttgaagatttatttgttttgtttatgtatacatgtgtgtgcctgtattgtgtgtgtgtgtgtgtgtgtgtgtgtgtgtgtgtgtgtgtgtgtgcagaagatgcccatggatgtcaagtaagagcatcagatcccctagatctggagcataggaagttgtgagctgcccaatatgggtggtaagaattgaactcaggcctttggaaaaagttgtatacaatcttaactgttaagacatctctccacatactcttctcttccatttgtaaaagtacaaagttacttttaagcagtgttctgtctgcttctgtgtctggtcttctctttcctttctcagcttcccatagcacatgtttgtctgaggtaagagaaaccaagtcttgccatgtgaaagaaatcccacctggtggccaacattccatattcgagttgattactgattggcttgaaacactgcctgagacccattcttccctctccaaaccctgccccctcagaaagaccaccaaaagtctaggctcctcctgcaaagctcaagaccacgcctacagggaagccatgtgatttctcccctgctccctagagtcacccggaagtgctttgctcaggttaaacctggccctttatttttaattcagctcaatttggcttactgcatcagcagagagacttaataaatatcggggtatggaaacctttcaattacgtcatgtcaaatattcgattatacacctcccgatcagtatagattcatgggactctggttcacagcaatacttttaagtggattttatttacagactctcaatacatttgtagaaatgaaaagaacacctgcacatttcaataaaatgcataagtccaatcaagaatcaaagcttgataagatttgagaccgccaaactctttacttaccacagttcttttcatcactgccatcaacacagtcttcatctccgtcacatttccacagcagagtaatgcagcggccatttgtgcactggaattgggaattatcacatttggcttttttccctaggatgaggaaggaacattgagcaatgtatgcatagaaggtaagttagagatataagttccccaaagcccttggatagggacagctgcagactcagcaaactgtaacattctagggaccagccttgtatgggtttggggggcaatgaacaatggtagccgagtccttcacaggtcaacaaactaaaactgaacataagatttccagccttactcccagagaggcatagctgagataccagtttccaggtagtagaatacaaagagaaaaagattatatagcttctaagaaatccaatcacatgctggccagtaatgttttagtcagtatatcaacatggacctcatctccaatggtgaccataaaattataatggagcattcccagcatctagaaaacacacagctgaagaaccagcaaaagaaaacggcagaagaaaaagaaacacctctgagaaaattggcagtgttaggattaggagatttcagactttaagtagctcaggaatgcattggagaacatggacacccaataccaagatgtcctcactgacagagtggtgtgttcatagagaaatatctgattgaaaagaagaaacagagcaaccaagccaccatgggcacgtttctgaaaagtatgaaggaaggaagaaccttcccccagagagagctccagtcccctccttgaggagaaagtccagaaggccttactattgcagaggatagctgcaggcacattagtgcctgcagggtaagatagcgacaggcctgaccctctatagttccaggaggtgtgtgtttatgtgttagttcttaggaaacacacacacacacacacacacacacacacacacacacacacacacacacgagaaaagctttcagagtaagcatataaataatatttttgtgtagctatacaccatgtgttctaagctcttatcagagtttacatttttaaaaagtgagccagtgagatggctcggtgggtaaaggtgcttgctaccaagttgacctcctgtgttcaagccctgaaacccatggtggagggaaacaaacaaaatttttaatgtttaaagagaaaaataaggataattcatcattgaagacagaactatttttataaactttttcttaattgagggtccaataatacacagtttttctaaagtgacagcaatgtactaggccttggctttcacttatcattttcttacaagctcactcagcaaattctaatcctgaaaatccatctacgataatcatcccatacagaggcatcattttaattttttacagatatatttttcggaaccttttccatgtttagataatttggatacatacatacttgccgttgtgttatagctgcctacagtatgcagtgcaaggaccatgctgtatacaggtagcctagaatcaacaggctagcccacatagtataggtatgaagtccgctaaaccactgtggtggtttaagtgggaatgactcccataagctcatacattttaatggttggtccccagttagtggaactgtgtgggaaggattaggaagtttcaagagcccacaccaagcccagtgtcagtctcctccaccctctctctacctaatgcctgcacatggactaggatggaagctctcagctattggtccagtgccatgcctctctgccagatgccatgctccccaccatgatggtcgtagaatagccctctgaaactgtaagcaagcccccattgagaactgtcttttctaagttgctttggccatggtatctcattacagcattaggacaataactaagacaacatcgccgtgtactttaagtaaaggagcaatgaactgttcaacactgtagttcttaggacttctctgtcatcatgtgatgcatggctatatctctaaaagaatagggatctccttttccttccctttaatccttttaacttctcagacccagagatgagatggttcagcaggaaatgacacttgctgccaaccttgagacataagttttatctctggaaactatagggtaggaaagaactataagttgtcctctgatctcctaagcatgctatagcacatgtgtgcacacatatacacacataaatatataagtaaataaaagtaataaaaattcttcttatgtcttaaaaaattggacatggtgactgggatagtgatcttgggtcatggaatcagtccaagattaatgaacctagctaggtcagaaccacaaggggccaccacaaggcccctggactcttccttgcataaactgtgcatgttgccaacaacattcagacaaccctaatcctttaatagcatttcctggccacatccacagctttatccaagagtgacactgcttcccaaagagccaacgacttgtgacaaggagagggtagaaataaaggattgataatggttctgaatctttaaaatggatgcttccttttggaaaataggtgtttacaaaccagctcaaaagacaagtcaaaagcatcaagaaagcttggttaggaggcagcagggtgccatttttaattcagtgatgggacaagaggagagcaagctagagctacagatctgactctgctttcctgagttcagttgctttggtttattatgaacacgctatttacagaggtgtgaactaaggcttcatggaggcactccatggccaggacagaccaggcgcttctgtctttagcacatctatcctcctgcaggaccagattgctttgtgataaaaaggttcagctcttgtcccttcaaggcctcccttaaatacactgctgagactttcaacactcagcacgaggcctcgggtgcatgcagattggctgggggagggtggttgcaagcagaaagccttcagatttcctactacctctcagtacttgcagctggggcatgctggcataggaacagacagggcagaggcaagcacagactggaactcttgtgtgaaacacacagtgctctagttggtctccctagagtcaactatgcccttctgtctgggagaattctgcactttgtggctaattcccaaagagattaaaatttggcccaagtcaagattgccacacggtgcggttaccttcaggtactgtgtatattgcttttaaaactctatgaagctttctgctcttaaacatttagcaagctagaacttagctacaaagcaataaaatttgatggtatttcctatcaacatctcatgtttattcattctacaaatattttattcaataaaaaatactaggaagttacaaagagaacaagaggtcagcatcagctgtttgttttttaataccaataagccaagggtgatgtacctggctgcctccttccctccctcccattgctgctatgttcacagaatggtctctgtattctccaagctggaggtaattattccaggggccatatgctatggatctatatccttccagctttgagggtgatgggagtggcaggaatctactttgagggcttgattagaaaaaggagtttgcagtctgagaatatagaatgaaacatactgagaatggatagtcattgcagttaggatacagtaaaggctgagagactgtcattttaaggcctttcattctgaagggtaagtaaaagtgagccaaaagcattaccactgaactctatatagtgagaatgatgagcctgccatcagactcaaagagagatttagaagaaagaaaaaggaaggaaaagaaggaaggaagggagggagagagggagggagggagggaggaaggaaggaaggaaggaaggaaggaagacagcaagctgcagaattagatctgtggagagaactgcctcagaaattattctggtgtgatggattttgtagacactcaagctgcattggggctaaagtcagcatataacatgctaaggctaataaacagttcacagtcattctgggctctggctttagttgtaatacacaaactatcaacaataataggttatgttaaaatcctggaggtttgggctcaggacacggatgaggacagacataagcatttttatctgctcacttgagtatcccaaagcagaaaggagtttaacttctacattttcagatcttacatgtgtccacattgcccaggattcagaaagttatatgtcgccacgacacacatgaccctccattaaccaagagaaataatttacacaaggaagacaataggtaccaagatgtccctgctttgtctaaaagatgctggggaaaaggatgggtggggagccagccagtttgataaaggatcctctaaagagaagcaaacaaaggccctaagctttctggccatgcctctgagattcttagcttcctaagcactaggcagaaagtgctccctggttctgtttagttctctgtctcactcacagccagaagagctgggccactaagttgactgagagaagagccctcagccatatgcctgggacactgtgggttttccctacaggtcccaaagattctacctcccatctgggggttccactgagaccactgctgctcagaggtccaggactaaaagcaccacatgaattaagaagcttttggctctcaaagcttcggggattagaggactgtagacccatagtctattttcatccatgaacgttaaatctcaaattcactattagagttcctagggggaacagaatgggcatgggatcatccgtaaccacgtttcttttcatcagtaagctttgctaaagccaaggtgaggcatggaagtggaaatgctaggaactctatacccctggatctgtctgctctgaaaggtgggaagctggagtaaaatacactttacactccttaaaactgcagtgttcacagaaaatagcatggggctaaagggatgggggaggggacagagtggagaggcatggagcctggagttctacctccatcacaaaccagaaagactgttggtgttagtttaggaatatgaaaagggtcttcatccgtgaagagattaaactgcctaagtttccttccagctctaatgttaagcaagaatacctttctccttgttggccaggagatttgaggtcacttgtatctacccactgatgtggctattacagtgagtgatagatgccctgaaatgtcaaagaatgtcctgcttttgttgtcacttgtatatatggtaccagacttgaagcttactcgaagacatccatgtcccaggagctttgctcacctaaatagttaacactgattgtgacccacaaccagcagttcactggctttaggaggcatgggggttaaatacacagggatgccagtttgctattatctaattggttctgtaaaggttaaaatcagcgagtgcatttgagtaaagtcctgctttagctttacagtgaatagcctagctggctttcaggatgggccacaaattcccccataggccttgagtaaccttttggcaggaatcctctgcttgggtatctggaatattggggagattctcagagtatcagactcagtgagaaggtgaatctgtaggggtttcatgttgccactctctgccagtcccagcgttcacttcacttgtctacacataagggtgttatcatctgctggtatttcctcagtccattgcttttggcacttctagggacactaaggacatttatttttagtctacctcatctctactgcttgctaatttaatgccaatccttctattcataggataaaactccttttaggacatgcagacttctgagtcagcaaaaaaagttttcctacaggaatgagaggctgtcagtgacaaacaatgccgagtaatggactatacagttcagttgttccatgtacacccgattgagagcactcatagatataaccaaatgttttttattgttggtcagttcctgctctaagacctctcatgtcttaactcattagttcaacgtgacctttcctcttcccctctttacagtttaggaaaaaaaaaaaaaaaaaaaaaccatagtgacttgtccaagactaccctgggctgacctgagagctgaacccaggtattttggctctaaatcctacactaccaagcacacaaactgtagtaactaactcaggactacataattctagaatattccattttcttggaatatagctactacagtctgcttaaatggaccaagaatgaagtggtttctctcctcaagagaaaacaccctacagtatagctttatcattgagataggccctatttcttgttctcatcatagccttttaaatatgctgctagaattcccataatgactttttctggaaggactaagtctcttgattttcttgactagggtgcattaaccaagtcatatcttcatcttatctgcctggggctggagaacaacacaggggacactagcatgaagaccaaaggttcagaggcaacaatgcatggaagaggctttgttttcaaggctctaatactgaatatactgttaatcccctaaaccctcatgtctgtcactgcatagagataggagataaatggaagtgttttataacagacatgtcgatgacaacttgagtacagcttttgggcacattctaggtaaccttcatccgggtgccttagcagacacacagagtaaaacagtttgttcccaaacccaccttcttctcttgtgtcttgcttagctttagttggcttgccacttactctaaatcagtagcccaggagggagtccaggttcttctctgctgacactgagccatcaaatcctggccatgtctaacccctcatctctcacttgctctaaatttaagtcacccttcctttcgcctccaggctgtctcgttctctatccaaattaagatagtgatttaagccccttaggatacccagaagggccaaggacaggatcatttcctgactccccactgactccaggattgagtctcagttccctaccagctccccctgtcttcttcctttcagccatcacccaccatctgctcaggctaccacagctgagctaacagctctaaagggtttctttccccttacttcccctttgaccatcctctccaaagcttcatttctgtttgtccatctggttcctgttgccttccccacaggatggggttcagctagcacctcctcactgaggccctctggacacttaaatatgtccccggagcctggtatgatgatctggttttgttcccaaagtttttcatacctgtccagtgccacagtacgctgagggcttgtcacctagcatccaaagatttgctaagccctagtcaatagtcatggatgtattagttggctagtgaattaacctgcaaatctgttttgcattatagacttctgtcaatatattttcccagcttttctgaacttggaaggaagtgtgacctgctaaatgaaattttgcctggtagaaacccctgaaagacgatgttaaagaggtactgtattcctatgtcggtgagagtattgtcatctcatctttgcagcaagttatcattataaaacaacataccttgcacatctatctgccataattagcgtatcagccacatttccatgtgagagaggctctaacacacatggaaaatctggtacagtgtggaggttggtgtgccaggcccaagtcttacttcggacatgctatggctcttggggaatgctggcactagaccactgtgcttctggcattggcatattaaagtctaagttgccggttattttagggaaacatcatgagctataatgaaagcagcatgtgggactcaagacatcttcagctgatgtctgtggtgctcatgattaaggaacaccagctcagctctctctagtcacagcttctatgctcagctccttttggatcttgagtttcctggtttgacttcctacaaacaaacaaaaaaaggcacagaggccagctctctggtttctgtactggccatcaagtggtcttaagcagatgtccaagggaaactggcttcaatttataacttgcctggtaaatctccctgcccaaattaataacttagatcttaggaaagcatgcttaggaaaagcgaagatcagaggttggtctagagaacagaatagtagacactaatagtctgtgcaggaaatgcgcttacaaacatgtgaactctcaaatgtccatcattatttcccagcaaactgcacattcccctacctcctcacctccactgccaatactgtttctggacacacaaagtccactggccaccttgccaacccagctgcaccaagttagtggcaagactggccactctagtgagtgcctgaccattccaagttgtagtttcttgccctaaatgtacttcttaaatgctgactctgacatactctctcccctccccacagggcatttctgccacacaaagctggcaaaagccctctgcacaaacttggaaacctttcgggaccacctctatgcttactctccctatacaaagcagattctttcttacatttttaattgagagcccaaaaatgactggcaggcccaaattgtctacacatgaaggcaaagtgggccctgttgaaggtgacacctgctttctctcttagatatacctcagttagcatgtctaacttgttggaatttaccattttcagggccttggttggaaacaaacactggagcttagcagagagatactgatttatatcgaaaacaaatatagagggtaaaattgagccagttttcactcacaaaatcaggttctccaagaactaggttatattatgccttggggacctcagaacaagctaccaatcctcagactgtcccctcctcagtgagaaggaaaaatggccttacatactcttgttcattgtgtacatttcactcataacctccaaagaaggacttttgtttttcttggaagctgtctattgtgctatggtctgggtgatccttgagattacttcaagttagaagaatctatctcctaacatgtgaagggcagctagctgccttagtctattgtgagacttgctcctgtaggtcaggtatgtgtgggacaagcacagtttcaggcccattttggttctgtgatgtgcttattgtctcataggctagcatgtgccagtgactttccaaagcaaggtcaagtgaagctattcagggtcaggaccagaggctgaaaagggaactaactaccccatctccatccagtttcctctactgagaacatctttacactctgtgagggaccaggaaatatttcctatacattttctctttctatgctatttggtacgtggcagggtctaggaatctaaccctgaagtcatatacctggggtcctctctgcactcctgaccttaaggctgcattctagggcattttgttttactggtctgacattgttcagggaacagaaggggtcacaacagctctttggctcttccagaagcatcacaaaagcactggagtgaaatcctgtctatggttattcatttttaaagaaagcagaaacacgatgatcagactggcaaattgtttggaaggtagagatggacccctttacaagtattgcccagtgattgcaaaagcagtttgttggcctgaagtcttaacatgtgccagccctactgaacttggcctttatatacatgctgtaggtctctggagacttgggcataaagggttgaaatgatataggcccagcactagagttgctggcaagaagatgattctaggcaaaaagctgtcccaggctttaggaaatgcatggcccatcaagtttggattatgatcctctcccaaaaaagaacacccttgtctacctggcctttcttggatgtagatgagattgctatggtcccttctttcccttggtgctctggtaagtcaggcattatttctcctggtcttctagactctttcctgcgggtacactggcattgctggtaaaccactccctcccagagcaagagaagagtcactgggcatgttggaagagaacttgcagagctctgactttgaagactacacaacatctcacatcttactatatatccaggctggaggaaagagtcccagaggccccatgtaacttgctatcagtccttgtaacagctcctgttagcgtcacttaagttccttgcagaaaattagtgcacacctgcctgcactgtgtcaggaggtttggaacagcctctgagtgtgtatgtatattgggggacaagaagaagggctggatagaaagattgagcatagaaggccagggccagaaaatcaatccacatttcctggtactttgaacttaaaacaaggacaatctggggtggctttgggtcaatacctgcttcagccaactcgaagtttgggcagttcagaaagaaccgcttccccactctgacgattcagggttgtgccaggttctctcttgccctgtttttacagcatggtcataatccacttgcagtaaaggaggagcaaaggacatcctcactttaccgatcccaactgaacaggttctgacttttgactaactcagtgcagcaggctggggtgctttcttagcacccccaaaaagtagcacccaatggaaagttagttagcacgtcaaagattcccagaccacaaaaggacctgcagctagagtgactcttttctcacacctccctgaatcacagccaacaaagtattttatacattcatgtttggaatattacaaaatatataacccaagtcaagtcactctttctgagggatggcttaataagttagcattactcatccattaatgattaatgtcagcgattgaaaattttttgttaagcagggcttctctgggatcgtaggcttgccacacgtagtattccagcgtcactacacatggactcttttcagagtgcagctggagaaagcaccagaaggaacagcccctctgagcctggatgaacttaaaggtaacccagctggggcagctcaattaactcggcgaaaacacgtgaccaacctaaacgcaatccagttgccaaccaatcgcatggggcagaaaagccctgcccagcttctcacgctcgggacagcggaaccaaaggctcagggacgctaggagacttaaacaccacagcataggtcgacagacggcttgaccacacacttgaaagttcgctcgcactccaggacacacgtgacagcacgcaggcgggccttctaagctactccgcgccaggagatgggcactgtggactctttagagctgggacagcgttctgccctaattacctagagctggttggcaagcaagctctttggtgtcacctcttaggacctctaagacctcttcagtggcctgctaaggatcagacgggaccttgttaggaaaggcgtcttatcgcctgctctggaaagttgtgcaacccaagatgggggactgaaaacacacagggatcccaagccagtgcgctgacccctggagactttcgatagtaacccccgccctccccaagctacagtcaaaccccagctctagcactacgccttcgatctattgtgtagaataaaggataattgcagtcactacactgggactcagtttcttcgggtgggggtgggggtgtcaccctgaacaaggctcggcaaagtaacctgattaagtctggtttccactcccctcccccgttcagttatctcagagacccagaggtatacaaacgccgcagtagcggcggaatctccggggaaaggagaaaagcactcggaggacagtccagttgaaagccatacttggagccggagagacggcccggcgcctggggagtcgcagtccgggtgcgcagcacttgtcatggctcggcctccaagctgccgcccaccgaacgtgcgccagctcacggctgcgcgaggactccctgcccggctcgcacctggcgcccggtgtcctcggagacgcccaccttcacccactgtgcgctctcaagcctgcttaagtctgaggggcgcacccgggcttccaggccccgtgctctgccacggtcctaacagcccgcctggcagaggaggcagaaccattgttcagtggctctaaagcccacatccctaaacccttgtcaaagggggatgaaaaccatgtaaaacagaggttctgggaagaaaggggacacaggggaatgacaacaagttcaagggacgctttaggacaccctaaaccccaccatcccccgggcccatctcccagtagcctcgattctgacagctcagaggcgccacccgggcggggaggggaggcaggagaggaacgcggagaggcgcctcctaggagggggtgggcaagaggaaccccagggccccccaaaacgcagcgatcgcgggcgcccgggcttgttacgggccgggtgcggaggggcgcgtccccactcaccgcttgcagaggcgcagctgtcccggggcgcccagcacagcgcgagcagcagccacagcgcccagcgcgcggacgtgcccatgctgcccgcccggatggtgccgccaccgccgtcgttgtcgccgttcgctccgcacaacaagttaccagcccttcggagaggaggaaggaggtgggggcggggagggaggaggcgaggaggagggggaaggagtgaggagccgggagcacggagagcgcggaaggagcgggcaccctttccttgcaacttgcacgctctactctccgccagccagccaccagccacccacccggtcacctcccccgccgaggccctggtgtgagcgcggaccctgcgggcggaaaataatgcaggcgttgcagaggaggggaaggagaggggaggggacggcgcgggaggagggggcggggagcccgttcgccagggacggcagaggcgagcggtcgggggcacccactcaggcggcggcaggagcaccgcggagcagcgcggggaccccagagggggagctcagtccagcagctcttgcacgcgccgctctcccgcgcgcggtgcggagggtgcgggggcaagtggcaacgtgcgtgcgtgagtggcagtggctggggctgccgccgccgccgctgccgccgccatccggacggctccaggggcccggctgctccgagcgcgtcggcccggggctcacgggggacccggggcggccgctggttggctcgcgcaccgtcctcacctccaatcccgggtgcctgtcctaatttcctgatccagggaacctgcggccgcagcagctgtgcgctccctagctccctacagtcgctactgtaccctcctggcgccggggccagagcgctgatgcaactattgctgctgttgccaccacttctgggctgacgggctgacagttgaggggtctgggggtggcaaggaatgctctatctccctcttctgcgcccctaggaagggctggtattgtgaggtcggtcggtagcatcttcctggggactcttctttccaacctgaaagtgatgaagaggaggggtgcaagtgctccactgcactgctgtggggtttggagtcccgtcttaatggcaaactgagatgccattttattaaacattaaatgtctttaagtctctctctctctctctctctctctctctctctctctctctcacacacacacacacacacacacacacacacacagagagagagagagagagagagagagagagagagagagagagagagagagagagagagaacgcacgcttccgtggttgtggcttttcctcttttcctctgtaatagaacaagactaaaataaccgagtctgggatggggaggagggaaattgccagcgcagctctgcattctctcatcaacgattatagttaattgctaattgcacaaaatgatagtttgagggcctgtaattaaaagcttaacctttttttatttatttttggttgggggaagaggacccgggtagatttattcttggtatactttgtaacattcaattataagcgttgagcagggaaagaaggaagcagagtcatccctcccagaaaggatgaacttttgggggttttgccagacaggacatgagtctaagatttgctcttcccgtccttcagttttcttgaacacattcccctggttaagatgccttctttgttctggcctaagcagagcagagctatttcgcctgttaatacagtgtgtatactcctctttttataagtcactgtaacttgaatgaaacaaagttgacagattccagatttcacatcctagctgtcttctggctttgttgtctcctcaccttggttctctgagcaattgtcagtggcaggcttctaggagagatgtttatttgagagcttcctgtacccatgggatggagtaattctcaaccaggacacattctggttcctacaatttattctcatcatgactggtaagcccacatccagatggggtctttctaagccactcagtgtgaatgctgttttgtataattggtgggtagaagatgggcaaaacctgtaccagccacacacatgttgcatgggaaacaaaattcatgccattttacagtgcaatagctattatttacctcaaagaccaagttgagtgggatggtctaatttaggtcctcataatctccagcacccctgggacttggaaaagctcatggtcactttctagctggcagaatgggtgggaacataggagaagtcaacattcaaaagctcagtattaatgagtcgtcacatgcttatttttaatgttttccttgagagagaaatgtacactacaagggaaacaacgatataccacaataagacttttctttgacaaacatgtattctgctttctagcataaatagtgtgcttattattattagctaagaccctgtgctcaatcctgtagctcattgttactctgcctctgattggctgtgcaagttcaaacaacagaacccaaacccctcctttttctctgcctgccttctgacctgtaaactgaaaacacaaacaaaccacacaataatcagaattttctcaagaaccagggggccctggcattcattattatcagaaagaagttacaaggaggtatgcatgtgattaacatagagggtaaccaataactaaaagaataaattgatcatgagtagatgatgtgggcaagtagggattcaagaattcaggattccggtaactgtgtcagtagtcctatttactcccacaatccaccacatgaatttgtttgcctaaacaacacacattgatcagtgccaggagggtagtgctaggcaaggcaatccccatagatacatagatacatacttatctgaagaggccatgggagctagtcagggtagggcagacatattgaaaattccagcatgttgcatacagcattggaatccagagttgttttagatgctgtaaaataaggagatgaggccagggctgtttctcagtggtggattgtttgtctagcgcgcacaaggttgtgcattccatctgaagcatcacaagaatgaatgaatgaatgaatgagtgggattgcgggggaaagccatctgagttggttgtaggatgaggctataagaaaaggctttcttaggtgcttgtccttgagctgatgtgctcagcatttttcacccagtaagtcacatcccacctccacctttttattgttggttgggttaagatactacctttgcctaattaatggtcggaagctacagggcatcacttccacactgggccatatagttgcttgtgtgaggctctctctttttgtcttcctggcaacaggaggcattcaagaggaggctgtgccatttgtccaggtttttgattgactgcatgaagctgtacacacatctttgatgatgtctatgaatgagaagggtttttaatacattttaaaggtttggagacatatactcacatattgtagaccatgttactcacaaagcctagaatatttatcatctgtactgttagggacaatgcttgctaatcactgacacagagtgaggaaacagtctatgctgacttaacctacagagactctgtaacgcaatgtaactggaattaacttgactattacactggaaagagggaaggaagggcttagagaggaaaccaaggcacaggagcagcatttgttcaaggcagtggagagaattcagaatggctctgtagtgatatattatttatgatttattaaagcgtgactgagatttcagaaaagcaaagtcaacctcaagctatagagatcaggcggtggtgatacacacctttaatcccagcagccagcagttaagagttggtgcttcacacctttaatcaaaaggactcaagattaagaggtagatggatccaaggccacacagacctacacaagagtcaatcagtctaaaagagaattatagctgacacctttaatcccagcactagagagatatagaagacaggagcaagtagtcagaaggaagcattcattctccagttacactgaggagaggttacagtctgagtcttggtgagagctcatggagacaggaccagccattcagcctgaggtagaggtaagaaggtagtggccaactcctttgcttttctgaacttcagcttgaagtttgaaccccaataacagtctctatgtcatttattttttcatgttacacggctcaatgttggggtccaaggaacaggtggtggaaagcagggctgaagaaggaggcaagcactggtttagagagccttggtgggccttagtgagtcacctgaaggcttttactataaagcacagagaggccttgaggtagaattgatcaggggtttggcatccaatttccttttgaaagatgattctgcagttgttttagacagggcagaaaaccatcagaagaggcaaatctagagatggagatgctggatgatgtattaaagaatgaaaagaattgttgctcttagtgcaggctcccagggctcttcctcagaaatctgctttaatagtactcaaaatctgtatgtgcaatcctattcctgtgatttgggagacagggatgatcacatttcaatttatacatctataaaattttcccaaagcaagttgtttaaaatataaaattgtatgaaagaagctgttcttagagaatgactccaatgtggttttatttgagaagtagggtttttttttttttctgtgaaaactatggaaatttgtttgtccaatttctctgaggcttccatcagggcagggccgaaagaaaacaccaaagttcatgctcttctcccatctgcctctcttcaaagccctcagacgaaaacataggggtctcagaagtcatcttccaaccagttggcaaatttgtactgctgatctcgaaagcctctgaaagtcagaagtgaacagagctgaccctctctggtgtattgagatgcttacagcctctcatttgtgtgagaggctagtggaacccacaggacccaccttctctctaggctgcatgggcagggcctgatggtttaaactaacacatcacacatttttaacttctatcagagccacttgaaagaccattctcaatagagtgcctgcctccaaccccagagtttgtgattgaacaggtccagggtactgctgaagattcggagttttcaacatcttcccagggaatactgatgctgttagtcagcaaatgcactttgagaatcactcctgaacacactgtggaacttcctccttcaagtacatgattggttcagggcctcaaccagttagcctgtggcattccccagatgcaccattcaaggcttaggccttaaacacattccccaagatgcctgagttgtgttgaggctcaagaacttagaacttggctctaggctttctcttggctagagaaaaaaaaccaaaaccaaacaaacaaaacaatagtagcaattgcaagtggggtttgcccgttagcatcttcaggcttccctggttaagtctggtggttaagtctgactcactcctgtatagtctaaagctctggcctggagtgttctagaggacatgtgggatgaagtttgaaggtgacaccatccatagagaggatgagggtcttgcaaaagcaaatcagccaccagagttacagaacagccttccagtcctcactctgggcatcctactcttggcatctcacactcagctaaatttgtcagctgtaagggagccaaagaccacaggaggtcaaaagctgggcacagccaggctgtgagaaacccagctggcgtccacctatcaggtgatggattacatatcaccagtcgcatgcctttctgaatcaatctaacaacaaggacttgttgagttccttctgtgggaccagcagcatgccaggtgactggaggcagcaaccagatagccatgtggctgctgctggggagcaagttgctattgttctgtttgctctttcaatgggagccaactctggcttgttaagtggtaactgacagtcctttcttctaaggaagtttctcttggatttgctgccaataggaagtgtattattttgcagagcactatagcattcatttatcgagtgcccactcaattatgaggcatgacagagtttgccatctgagaaaggaaagacctcttaaggattcttagagtcagaagtctggaacaaatagatggacggatcaaagggttgggggtggatttcattacaaccagagacactctttttagcaggagctggaccttccattgaaggtttaaaagatctttcaaatgagttctacagaaaataaattatgactttgagcataaaggaatcatgaattcagcagacatcataacgatgtggttattttgttaagtcaaaaagagaacctaggtgtggtggcttacccttgtaacaccagcccttgggaggcagaaaccgggtcatgaattctaggcaagcctggactacatagaaatttcaagatttgtctttcttctgacaccatattgtactgacatcatcagactatcttcttgcaatcaaaacatactcctttgctatctgtgtaagaagtatgtgccccgagggctggacttgtggtttaaatacctgtttgtggaacatcaatggaaagtatggggagacatcattcgatcagattcttttggtgaattccagaacagtccctttcaatggtgtctttgagtaggatagactattgcttggttttctttctatttcttctctttttccccctttgccaagacctgaaaacaaacaaatgaacaaacaaaacagaaataaagagatggagggaaggacagagcagaaagatgggaatagagagaagggagaaagaggagaagaaggagagaatattcaaagcattcaataatctaggaaggtcatagaggatctgtctctctttgtctagtgactttatagagctggcttcgcaagagagacagattatttctacatgcagaacagaaatatgatagctatggcttacatagcatgagaagaatgtcttcaacttatgtgttgcctttcttctgtgtggattcaagtattctgcaaacatgacatcattactctctgaaaggagactttggaccaactcttaggaaaataactcccttttaggagctcagggagctcaagcacagattagtgtccatcttgggtttatgcaaagttcccccccccaaatttgatcctagccctccttatacaataacagtcattattcctcatggcctcttgacaaactcatactttaagaagccaaactgtgaagtttcatcactttttgtttatttctccctaatgatcagtctttgggcttagagatatttatccaacatctttgttttaacaaggcaaaaataaagtgagaacaaaacaagataccaagtagcatagcaggctcccctgggatcaagtctggagtctcagagcactccccagggaggaaagaaaagatattctcttgtgtcctcttgtcatctctcagtaaagcacagtttccaaaatcctgctaacaacttgatgtggacagtataagggggagttatagtcccagtcattataacttttttttttgttctgtcagtcacatcttagtcaagttacttatagttttcctctcttgattccccttcacccctaaaccctcttctctcttctgcttgcctgtatgaaaataccttaggagctctggccatggaagaaagttcctaggatatgaagacaaatggagctgctccttctggatctaataacatttcctcaagtctagttgacttcaggagacagtcattggagaaattatcggaactgttgcaggaggggttatttggaaattgacagtgaaaacaggaactatttatcaggtcaaattctattccagttttctttgcctctgacctgagctgcctggagtttagttttacaaatgggtctgatagtctgtcagacagagttattattccattagtgtcttgcttccctctcactcttttgttatttttaaaataaaattcaatcttaaattatattaatattgtatttgataaacaaatcttgacagtccacctttatgggatataatgtgatttttttaaatgtaaatgatgcatgatcaaactaattgacttctcacttcatctgcctatcacattttttaaattattttttgcctatcacttttaatggtaggacatttgaaatatcccctccaagttatgtaatataaactatattattttggtttatgcccaattggctgtgcagtggatggcaaacatttcctttccatctataccctttgaccatcagcttccattggtccctacttccccaagactcttgagatccagcagagtatttatttcttcattaccaaggtaccttgggtaggaaacagtactgcctagctacctctctgtcagctataaaaacattctgtatttagacttgaccctgtgtatactgagcagctgtttggcaatgactttcttgttgctaactggatttggggaggactctgtctttctccccgatactaacaattaaaagaaaagatataccttcatgaggctatagtgggggtattagctttattaggactaaataagaaagtggtgttcctggccatgtatttagaattgcactgtcaagtttatcttcgcacctgttcttgctgtacacattattcttcctgagaaatggtcatgtttctcctttcaaagccttggctaatgcttttgtattggcccttggagcctcctcccatctatcatgatgagttcctacaccctcttcccgagcagaatctcacaaaaccatcttgtgttttctcatacttacctttgctcctgatggccagcatcatgtgggtaaaagggttagtgacattgttatcattgtggacttgtccttatatctggtaatgtcgggatcacaaagcactactctttatttttaacttttttctccaactctgttaatattcccgtactatttttcttcagctcgatttatttatttattttctccatttttgaaatttaaattagaaacaagattattttacatgtcactcccagttccctctccctccccttctcccctgtctgccccccactaaaaccctacctatcccatacagtttctgctccccagggagggtgaggccttccttagggagtcttcagagtctatcataacttttggggtaggcctaggccctctccccttgtgtctaggctcagggagtatccctccatgtgagatgggcttccaaagtctattcctacgctagggataagtactgatccactacaagaggccccatagatttcccaggcctcctcactgacacctaagttcatggaattcccatactattaagggcccaccctaggttcccagcctgtactttatttagtatgtttacagtgttctgtctgcatgaatcgctgcaggccagaagagggcaccagatctcatcacagatggttgtgagccatcatgtggttgctgggaattgaactcaggaactctggaagaaccccaagtgctcttaaccactgaatcatctctccagcccccagcctgtactttaaaaagtcctttaatgacaaatgaggataagttatatctcatttatacttactgtacttttcttagctgcctaaatctctccaaagacctagacccatacccagggtgatgaaagcacatgtcttgccagtttctctgcacaactgcagcacagtcttggactccgtacaagccacgtctgaacaaatgttgtttcttggaaagaagttaatgctaacatttcactgtgtgctataactactgaatagcatcctgtgtcttcactgatagatacaacatggatcaggcaccaatcttaagcgtatactctgatggctgacattggaggttccttttctatcctatgccttcttcctggagacaccccagtagaggtagcaaacactgaatttttcccatgtcgcagaagccattgccattcttcttgagatctgcatgtgccctcagagttgttatatctagaggaaccctgagagatgctcgggagagccatcctacctgaatctggcatggcctccaaggattctgagatggttcttgaacagattgcttcggtgcccagtgtcatctgagggagaaggaagcatgaccttatcagagcaatatcaacttcttttgtatgtctgtggtgtgcacatgcatgtggaggccagaagttgatgttgggtgagctcttatataattcctcaccttattattcttttaggggagaaagggttgactttgccttatagttccagggcagacacagtctgtcatggtgaggacagcataacagcaggagcatgaagctgatctgactgtcaggaagcagaaatatccattttctttctttctttctttctttctttctttctttctttctttctttctttcttcctgtttcatagtcttctctatgtttttaatttaaattttaattattttgagaattttctatataaaacctgtatttacatcacttctatccttccctctcctccctccaattccttctatgtctcccccaattccctctcaagttcttggtctccttggtaatcattattgatctatctatctatctatctatctatctatctatctatctatatctgatcgacgcccaagcccctttagagtttctcttattacatgtgttgagagtgactacttgggattggataatctctaaggactctagtccttggagaaaactgactctcacattgaatgtctatagctctttatctagggtgggacattgtgaattttccccatccatgttggcatgctgactggtgatgtcattattcagattttgtctaggctgatctattgttgagatttcatgagtttagcatccctgttatgtttagaaggcattatctagcaagacacgtcttgttctctggcacttccaacctttctactctactttccctgatgttctctgagccttatatatagatttcatagattgatacattgtagaagcaccagttgtggctggatgccccaggtggcttattatcttcatttggaatagccgtagatcctgtagtagctttctgttgcaaaaatgagcattttttgatgagggggcagtgagagttacatctacctgttcatatttgagactaggtctctcatgtaacttggaattcactgattagaccagctgtccagggagaagcaggggtctgcctgtgtctcccctgccccactaatacagaggcacatgaccgtgaacagcttttggtgacagtgctggtgtccaaacttgggtgctcatgcttacacagcaggcactttgcccactgagccaactcccctgatctgtagtatgaagttctagagctactggcaacttagttttcccttccatagtaagaaaaagcttgttaattgcactcttggagcgtctagctttcccactttgcaagacgttgatgttctggaatgaaagacctaataagcccatggtgtttagtgattcaacattgaagtttgtagcatcaacatacaaatttacatctcttggacaggaatcagtaataattgagctagcaacaggagtttgagtgcctttgtgagtttgtgagtgtgtattgtagagatttggggcccatattgattagaaaagttttctgccatataagtattactgtgtgtttgtccagagggtgagcctagttattttgcttaggagggaaagaataaatttccaaagtgttgttttttttgtaaaaggggcttttttgactctagaataatcaccaactcttctatgctctgtagtgctatactatttatgatttattagagcttgcctgaggattcagaaagcaaagtcagccacaagccatagaagtcaggcacacccctttaatccaagcagccaggatctaggaggtgatggtacacacctctcatcctaggactaagggttaagaggtagatggatctctgtgagtccaaggccacccacatctacacaaggctgatccagtcctaaagagaaacagctcacacaaagatgatctcagcacctggaatcacacgctgttaatcccagcattagggaggtttacaagacaggagcaaggtttcagtgtcctgcattcattctcaggccacattaagggtaagaggcattcattctctagccatgctgaggagaagttacagtctgaggcttggtgagaacttgtggagacaggatcagcccatttagcctgaggtagaggtaagaagttagtagccagctgctttgcttttctgatcttcagcttgaagtttgtagcgcaattatctgtctctgggttttttatttttcatgttatgatgttcgtcacctttatgtggtatgacctgtgctgccatttggactctaaatctgggtttttatccaggctttgccatttatgagctccacgccctttcaaaaacgtccctaactccttctgggcctcactttcattcaactgggagagatgattcctgtctctacatctggtaagggttttcccgtgatcgtgtattgatattctgatttctgaattctagagaaggttataaaataagagtaagtaaatttgtacaggaatcgagcagttctccttgagagaaagggaccaagatctcaatccccaattgcaaaggcaggacacagaaatcttcgtggcagagggggtgatgtggactataaagatacctgacagtttctgtcacagaaactagaatggtctgtgccccatgtgaacaattgtgctaggtcttgtcctgcgacaaaaaacaaaaaacacaaaacacaaaacaaaaacaaatccaaaccatgctgccatgagctcagagcttgactctgaggattttggagggaggcacacatgcagactactgcagcttcatggcacaagtaatttaataaagaactttttagagtcccagacacatggtaagaacctgctccatttaattgctgttactgatgacaatgcagtcaactttggaagcttgttgatttagtttactgtttgttgaaactgagacaaatatagccaaggctggcctcgaactcctgatcctctgggattgcagtgtgtactacacctgactcaggaagcttattggtttgaaggaagtcagtcaaaacagaggctacatagactaactctgtcacaagtagtggatccccaataaacaataatttagcaagagaaaaacaaaataactctagatcatattgtatggaatgttctaagcctgaaagtaaacatctctcttattcatcatgcttaggagtgtccatccattgttgctgctgttgctcttgtttggggtggcctctccctgtacatctcagactggcttcagtccatttcctccatcccgagtctcctgagagccgggattactgacatgccgccactcctggcttcaagaggattccttcttaatgcttcattctgagttccaacagaacctctgagtcacaacagcagtgcttctcaacctccctaatgctgtgaccctttaatacagttcctcttgtggtgctgaccccaaccacaaaattaatgcattgctacttcataactgcaattttgctactgctatgaatcataatgtaagatctgtgatttccaaaggtcttgggaaacccttgtgaaaaggtccttggacaccctaccgaaaggggtcatgaccctccaggttgagatcctttgctttacaagatggaggctgtccataaggccttcatggagctccagtttgttatttaatgctttgttcccccagctcagcggacctagaatctatcagtgtgctgaggaaggcacttggaagaggaattcttatgactcacctacgatattccttctcttgaaaacattgatgactattagtgtgtgcttgtgctgatgcaaatcaagtgaccaggcagtcttccacacatgcacgttcctgggacaaagcacagaggaaaactctttgaatatgctcagtgaaagcattttgccagctcagaacttagaaaagaaatcggccttatcatggaaagtggcctagggctcttggagaaaacactgctggtgggacaaccactcctttcttttatcagtgctgttctgccacggaagatgcgggccatgcctgttctagagaatgagaggaggttctgatcacaggaggccgtcattcccgtgggcaattttccgttattttcttttttctctttctttgtaactttctcttgtaactgctgccctggtttcattctgttgctgtgataaacacctgaccaaagcaacttagaaaggaaagggatgatttgccttaaactttaggtcataatccatccatgagggaaaccaagccaggaactcaaggcaggagactggagatgagagccatgaaagaatgttgctttactggattgttctctgctgttcttatgtagcctagcttcaccttcctaggcatggtgatatccacagtgggatggagtctggcacatcaattattaatccagacaattcctcaccaacgtagccacaggccagcctgattgggaaaattcttcagttgaggttctctattccccggtgactctaagttgtatacagttaacaagaaaacccagaaggacacttaaattattttataaagactttaaggcgtgtttttaaatgcatacaatatagctaagtgtacacatctataatccaaggacttgggagactgaagcagaaagaccaagtatttggtgccagcctgagcgctatcttagtttatatgagactctctctctctctctctctctctctctctctctctctctctctctctcaaaaaaacagcataagtgtggactaaagagaaaaggtgaaagcaataaggtgaagttagctttagaaaatccattcctgtggtataaaaatttgtccttgagtgtcctagtgaccagaactaaaagtaaaagaatctcatttgctggttacctgcttgaaaagaaaaaaaaagtgaagtttctcagaaacagctccaacctccttcatacacacaacagaagtgagttttcttagctatttgtacaaagggtgtttggagctctgatgatacagttcccccaggccggctggctgccatcagattgtacaggacctttgtataatggccttgattggtctcgtgccaaagtctggctccaccaaggaaaagaaataagtcccaggcagtcatccattctcatcatttattgtcactgaatgcatgagaagcatgaagcttcactgagctagaggtcacctctgatgaacctcaagggcacagttctgcttagcaggtgtccaagtgcaaagccataggctccagactagttcccttagctaggcaaagacagcattctcttacccatagaaaaagggagtgcagagtgctaggcagaagaaaggccaccttgcctccacatgagaaggagcaagcacctcaaagaacaggcaaaaaattcgaaggaggggaagaaaaaattaatagtgattttattaccttaactgcttgtcacatttttgcatatttctatcttttaaaaaaaaaccttctcatgggtaatgttaacaccatcagggtgtgcatacaaattcattccatttttcacttaactaagcagcataaaataggttattacattttatattaccagagtgtgcagggtgctatgatataatcttcactgtgcttcagaccttccataaagtatgtcatatgccacatgccacaagtaagtgatgccttaggaaattaggcaaagaggctgcttcatgagagtagaatcagtacagggatggggggaatggtgggaggtgagaccagaatatggggagattgaggcaaaaccgaaccagaagggaaagtgtctgcaggaatttacaccaatggagagttgaggagccttggggtctgaggactcaattatgtgtgactcgagacagaacaagcgtgcctcctgagagaattttgaaaagactaagtgtgtataagacctgccctttcatccaagggagaattagagcagccaccggcagtgataataggtgatgtgactttgtaagactttttcccttttcaaagcaggtttttttttagaagccacttttgtcatggtcaagaacttctcttagcccttcctttggaagggaaggggaaaacataattgcagaagagattcacttttgcactacttcttccatgtaaatggccaataaactgatccttgctttgttccctttttctatcaagaatttctgattccttaatataacaacacatttattgaaagcatgcctttttttaaaaaaaaagctcactttatttttatattttacatgtttgagcttggacccgtgtatgtatgtataccacatacatgactgtggaatccagaagaggacattgggtcccctggaacttaagttacagacaactgtgacccacctgacatggatattgggccacctcttcagccccagataccagaattattagtgtgtgtgtgtgtgcatatgtgcatgctggcattgaacccagaatcttctgcacacaaggcaagcaagcactctgctgagttatggcctcagccatgaaagcgtgtcttgaatgacctctaggttttgttgcctctgctatgatctttcatagcagatggcttcattacagtgctttgaaataggtcatttcccctcttgattccctgtgttacttctgtcccaggaagaggtggggttgtattttcttaaattctggcagtttttcactggccagatgatgaggcttgcaggaatcagcatcttaatacacgagaaccttaaaaattagggggagagggaacctgtcactaacttgcttcagataatcactttgctatgaggactgtttcctcagaagtaattcaaccaacatgacgtttaaccatttaaaagtcttcctttcccaatgaatggatgtgggtatctgaaaggacatgatgaaattaggagcttttggttgtttgaattaagcagctgggattaatgagagggtagcttctgcctgtagtgacagggcctcttccatcatctcgctttcagttaatggaaggaaacaatcaatgtacgtttggaatgtttttctctctctagccaacactgcgaacctcagaacttgttagttttactactagatacttaaatatgtgatggtaaatgtccaatggaagtataaagcacagctctcttttcttttcaaatggaaggggattttgtgtgtcaaacatagcaggtgggtgagcaccaggtgttcagcttcttcagagccctcactggggtttcagaaatgtaaatataccccattgtacagaacaagctgtccatttcctggcaaattgattcagaatttggttgtgaattaaattctctgtgcacaaaagctttaaattttaaatttggagaaacacttgtgtgctggctgatgtgagtccgtttagagcatctgatgggacattcagatggtggtgaaagccctggaatttattagttgactctgaccctttggagttctggtggcaccattcctatgagtgtctctgggtcttttcctagattgaaaatttttctctttttctatttgtggtttttagaacctttatcttggggtctgtctctacaattaggagcacttgttacaaaatcaataatctagggacccaatgctgagctatagctccagatccaaggtgggtggagatgggagggtccctgggacttactgctttctgccttaactgagaaaacctgtgtcccaagagagaccctgcctcaagggaataggcagagagtgctagagaaggatactcaatgccctttgctgaccctgaaagaccccctatggggtgaaaccctgggggaatgcagcgaccccaatcaccaggcagaggtgaggacttgatgcaaatcgcaagaggctttattgtttaatgagctaaccccattagctcgggcctttcatccacccaccatggtggatggctggagaaaagaccccgagaaaccctgggacaaagatcttatagaacagcataaggggagtgtctagaggtacgcacaggctcaggattggtgtgcctccaggcttggaggacttggcctgtgttgattggtcaactggttgttatggcccataggccctcccagggtggttgctatgctctgcacatcattgttgtgcacttgtccgtaaagcacacccagagccataaagcatagcaccaccagctaacttctgattggttccttgccgtgaggcaggcatctgacctcctagtgaccaaggcaagttcaggcaagcacgtgttaggctgttatggctgccaaaacaggagctagtcccttcaaccctactgtgtcttttccattctcctttacccaccattttggagggtctcatcttccttttattttcatacattaaaaaattagagcaaatgaatatagcatttataattaacgtttcaaactcattttactttttttcataaagtgctataaataaaatcaaaacttcaaaaaattatttttatttgattattactctgtgtgtgttgctgtacacatgcacgtgtacacacacacacacacacacacacacacacacacacacacacacacatacacattcatgcacccatgcaggagttcatccatgtagtgcttgagtaccacaccatgtgttcagaggtcaactctcggaagtttggaattaagctcaagttgtcagacttggagggtgggtgtttttcccttcagtgacatctttccatccctggaactgcttggatacttggattgcactctcttcctcttcttcctgaaggtgacctcctatcaaggctcttagcaagctacacaatccagcaaccccaccccaggccctatctcttgtttgtttgcacagatatgctggcacctgcttcacggaaggatgtcttcttgctctgcaacattaaatcaagagatactttgagcacctctcacctatgatgctctggaacctgcaagtttttgtcccaagcattttaggtaagggttattcaacagtgtgctaggtggtccagaaataaatgtaataaatgcttcgggtggaaatagggtggaaaataagtagactggctgcctattggtaaactggtgaggaagaatcatatttaggagacttgggtgatgcaggcagagcctttgaagcctgaatgtgtgtttcctgctggggttctgtctctaagaactcctcagaatgaacagctagatttctggtgaccattcctaattcccctttatttcccaaacaagctggcttggatctgcaatggtccaggtgtcatttgtttgtttgtttgcttgttttgacatctttactttcgatgctttccacagattttaatatctataatagggtcattggtcttgtgggtgtttcctaattccctgaccatgtcatggcttggatgtcatgttcttaagtttataccaatcctgtctcttcttgtctaattgaggagcctaaacagtgacttctgatagagagttctcatcctaatccaccagggcaagcttgggccaaggtagaggcttctactcacctggctaatatttgatcagctttgcaaatccctgctcctttatttgctgtctttcacctctctgggaataaatgcagaccccagaggcaaagcactaaaagggacagagagcctgaagcctgagatgtcaacctcaactccaatgactgaccagttgtctactaagacaggtcttagaaggaatgatgccaatgactgcagcagattctaagttctctcttgggattgcttgaagcacctgctttctatggttttaggtgttcttgactatgaaacagagtgcaagatgggtgctgggctatccctgagtatgtgaggggaccttctcatgggcccatcatctatctgcactagaacacatgcacagtagtagttagcggactcctttgtgagcatcttcttgctttgttccctccaactcttcagcttccttccatcattcctttctctctctttgccttgacttatgggtctgctggactttctcacctggtcaacttgttcttgcagctagtgaattgtagggctccataaatggagaaatggaaaatattgatccaccttgtatagagcctgccaaaattgtcttcagcccttctcactttcatcaaataagcagggaaataaactggtgagtcatggctccaacagacacctgaaagtcaggactcatgctccactttgtgtctgctgtcagtggggagggtctcagcttctataaaaagacaatgctcccaaagaacgactctatttttgcatattccatttttagctttcttggtcttatgtcccccagtgattaacttgtggttcgtgagaaagagtaattgatccattttctctctgtgctgtggagccttcttttctcaaggttaagttacaactttagaagactctctcacctgttcacttccagccagacttctcagtaagtcagaaatagtgggtcaaatgccactggggcatctggctatgtcggttctttgttgactctacaatttaccagtctggggacctttggtcattcatcaaacccctttgaatatcagtgttgtcatgtgaaatatggggttctgagagtgattaaacatacctactgaggtttttgagatgcacgtaggaaaggtataacacgtgattagcataaaagagagtgtagactttgcacacaggtataaccaactacagttgcggtccttctgcctgcctcttcctttgacagtgattcagagcttagcctctcctggagctacatggggccggtcttggctccacctattctagtatgaggcaaaacctttcccaattttgaggtgtctgtgtttctgatttaatgatggtggtggtggtagtgatggtacatccaagttcatttaaagtgtttagctaactccaaagcaaacacacaaaaaagagtgtcaaagtggctgttagttattatacaatgattgctaacaatgtctccaaaatcaaaatattaggatgttctttaatcgggagtcagaggcaggcagatctctgtcaattcaaggcatgtcattcaggtttacatagggagttccaggacagctagagacctttcaaataaacaagtaaaagaaaataaaaagagccattttttaaacattgctgaatttctgggttgctggcagagttgtgacgagatcagagtaaagtgctgatagagaggagggatcctgtaaggagggatgctgctggttcaaccagacacaagaagtttctttgttctggagtctgtatatctacctcacttctctctccaaaatgtgagcacatcattatgtggagtgttacctcaaagcaacccttgaatggcattagagtcagtaagaggtagtagtagagttatcaaaaattagttgatatttgaaagccaaggtctgatctgggtttggtgctgagacaatgccagtgtgttgagctggggtggggggaagtatcagagaccagcagcttgttttataggttttcctgagctaatatccatgcaatccctctgaggcctatttaagatacagtctctctatatagtgcatagtctttgtccttaacaaatgtggactctctaatcacactggctcatggtttggcttttctcactaattgggttgaatgtaatctacataagttgcagtattcttctgagtgagagttccatgataactactctacctttcttgctggtaggcaaaaccctcatgacttgaacaataaagtctcaagactgcctctctgaaactgttgagcaagagcccttttccttacccacagctgataagtgaccacagtgggaggatggtcaccctgcaatgccagcagcctaacttccagccagtgtgaaaatagagctctcctcttccatctttagtgtagtaactcagcttgtactcctgtccatacccaccagaaccactgtgcattttctgaaaaaacattacccctaatcatcaaagcaacaattaactcaataatcatgacattaagacagtttccctggggaatataaaattggagagcaatgttgcaatatgcttgggtgagccatgaactgccatgaaataaaagtcaatattgtacatgcaactataaataaaaaatactataggacattgagacatcagagtggctctctttcgtaggggaatgtcctgaagataaagagaaataagagagagtactcaggatgggacaatgtttctacaaatgtctatgggtgactgcctatattgttcttataccatggattacttgatatatttaacatattaagaaaagtttctgggggctggagagatggctcagtggttaagaacactggatgttcttccaaaggacctgggttcaattgccagttcccaaatggcagctcccaactgtctgtaactccagtaccaggggatctgacacagatacacatgcagccaaacaccaatgcgcataaaataaaaatacaggaagatataaagggggtgatcacagggtaattctaccctgagcctgcgactcccactcattaatggacttttcgattttctcataggcatgcatttcttacatcatgtgactccaactgtagtaggtattcttatggcctactttggtttaaatatcatcagtgccatctccattttgaactttccattgaacattcctcaatgtaaatgtgtcagactaatgatattctttgattttttaaaaactaatgatgttgctgccaatatttcagtatattaatttttgatttttttggtctacttctttaagagagtcttagaaagggggtcaatttacttagacatctgacatattgccaaatatgtttaaacagatggtcctaaacttcatgtatcaggatttctgggtgccctactacatcttcagttaacactgtgggtggctttcttcctggggtgtttctcagctttggcttatattagaatcaacacagagcaccaaatgtgcctatggctgacctttgtcctaaaccaattaagttggaatttctgagaaaagtaggggagccaaggtaatagttactctgaaagcattcaaatgagattagctggttaagatggcagtgttagccaggcctagtggcacatgcctggagacagaggcatgaagacagagtaagtcagaggccaacctaggctatgttgaaagttccagaccagtcagagctacatagtgagactctatctcaaaataagtaaataatgaattaaacgataaatttaaaattagttctatttttagttgtctttctttctttctttctttctttctttctttctttctttctttctttcttctgtgaggactccttcccatacttatttctgtcatggctgttctcctcctcctggccaccagttgaggttgtttgttttctcaatggctgccattctgactagggtgagaaggaatctcaatgagattttaatttgcatttccctggtggctaagtagaaccactcagttaattgaataaataaaaatgctctcttctaaagcccttatggttgcaaggcaaattagaatttaagcattcattgtatattggttattttattagcttgaaaagcatactatgaagttagaatcctagccaaaatattttggcgttccactttcacatacagttgtaccttggctgttatgaagcattggttctgggacacattttgggaactagagtctgatgctcaaaccctttaagtatagtgttggcatataacatacatcatctctatatacaatacctaataccattcaaattctgtgtaaagacttgttacatgatatcacttagagactaatgactcctcaagtctgtatatacttgtaaagaattttccccaaatagccccatctaaagttaattgaatccctctcatgcatctggaaccctcagatatggagaaaattagagcatcctgcctctaaacagcattctttccatctcaccaattggtacctagactagggttagaggagctttcctcatgtcacctctaaactttctgcttgaagctcttcataaatggtaaatttcatcttgtctcatctttttttaatcactgttcaatttgactgactgtccagcatttcatattttagcactggaacatgtattattaaatgcaagggtctcttctgtatggttgtatggtatcttagatgttgtttgatagacaatagtaaagaaggctaaaaatagcatacaagttgttttctgattagtgagcacctaatgtttctgtttcatgcttctgatggagttagtccagggaagcccgttcacccaggatgtcagtgtaagctgatgtataacactctgttctcccttacccctttaaaaaaacttaccatggtgtaagtgatttaccactgagctagctcatcaccaacccttgtgtttggttaggtgtagaggaccctgaatgaagatagcataataatgccatcttatgccttccattactattttaggaactaacactcagttaagtttctgtttctttacatctgcctattttcttgtaaagcatatgtccatgtctttgtcaagagagcccctttcaccctacttaacctgtattgatctgtctaataaatcgagacttgatcagaatactgtcttgtctccatctctcgagtctcttgccccttcattcccactccctctcccagggctcccgctgactgacccctcgggccaaggcagttaggttttgttttggagctagagatacaagggtagctaagacaggacacagttggatttccatcataaacaggcaggcaagaaatgaataatgaagttagatacacttgcggagttgggcatggtaattagatgcacacctgtaattagagtttaggcggggggtgcacagaggcaagatgctgagtgtgggggtccatgatgagccacattgcaagactgtatacctcatcccacccaacaaacaacaaaacaactattaatatggaagccagggcaggttagaatacagaaaaagtactgaataaacgcaagcttagtgaatgaatgcctttggccagtgtggaacctctaaggcagcagcatggacagaagttggtgcttcctctggttgatactgggaaaaagaagcatctctctgcatccctgggcagtgatggacggatgcttttctctaagaagggaaaaccagaagagaggcactgtggacaaatgatgaattcatctctaaggcattctatggggcatccaagtgaggattctatgaagcagttagatgggtcaaaagtataatgagaaaagcctgggctgcagttgtggattttagtttataagccattggaataaaggagatcaccaccggggatgaggaacagaagctaagcacaaacctttgggtacttacccagtgttggtataggaaagatgaatagcaatgcttcctatgtgaacaagaagatacacatcctaagtccatgctttctgtatgaaccccattctttccttaaatcacacaactttccacatctttgttagggctagggatgggttgagaaggatggcaacaacaggcaaggcttggaaacatgaaaacctggagaaagctagaaaagttaatcacaagtatgggggctaagagggatagggagtaggaaagaaagtcacagcccaatttgggagattcaagcttaactttaccatgaaatataaataggcgctctctgtttcctgacagtattagaacacaaaacaaaggtacaacctaaacaactacaatagggtaatcaattcattgctgtctagttaaagaatggaattataactcattggagtgagttatatcacaaatcttaaaaccacaactggggaaataaaacatggtatcccagattatatgtttatttttttgaggctttctttgtttgcttgtttgttctgaagcattggggattgaaccctaaaccttgggcatggtgggcaagcattctaccactgagtgcattagcaggaagaagtgagtgccggtatgtagaaacatacacactttaccctttgcagcttttctgtgaatctaaaaatatccccagctggagggggcagatgtgggcgagaaaggctgtaaatccagtgtacttacgtatgaatcctcaaataaaatgtaaagttatccccaaataagaaatgtatttaaaaaacataagctcagaactggggggtgtaactcagtggtgtgaatttacaagtgtgtacgtgccctggatttgatcctcaggtctgtgggaggttgggaagagaggggaacattgtgagcaacgtgagctcaaggcaaaacaagtaaactgcaaagggatcgtcgccacacgagaacaccgatgagaaattaaagcatgcaaaacaatgctagacgtttaaagacacatagcacatatttaatgaagataaggaatgataaatgctttgtttaaaatagtaaaagggagaaagtattatatgttcaattaaactgaatacaacaagctttttaaaaaggtcaattttttttcttttatgtgtatttgttgtgtgtatctctgtatgggtgttttttttcttttatgtgtatgtgttgtgtgtatctctgtatgggtgtttttttttcttttgtgtgtatgtgttgtgtgtatctctgtatgggtgtgtgcctgtgtacacaagttccctctgagcctgaagagttggagctataggcagtcgtgggtgcccaatatgtgtgctgtgaactgtacttgggtcctctgcaaaaacagcaagtgttcttaattctgagccatttttcccagccccagattgtcttttcctccaaagtacagcctttgagtttgatttgtaagacaaggtctaatatgcagcccaggctggccctttgctctaactgtcttgtctctgcctccccagagctggattacagatatgccttcactcctgcttcatgctctgctccttcttgaaatattcccatttatttataaaagaaaaaacaatatttcctttttaaataattttacctcaaagtctcaggtcagctatttatggacttccatttcctcattgttgcgctgttctccattttgttcctcatcttgccttctgcaagaacagtacagctgtttcttagattcgttttcccagattctcttacagcccacagtggccacacgacgcagttcttctaatctatctgtaagccaaatgctgcagagagcttggaggaaaaggttatttctgccacagtgggtcctcttcccttctagccttgggttcgggctgggatgcttgcactgtggttctcatcttgtaagcacgcgctaacaaaccagagacaaagatggggagagttatggagactagagtgtccactgactattgcccatattctttcacgaggaaaactcactcctagtcagtgttagatactattgatcttagttatgactgaaagtatcgctgacttacctacataatggtcagcagtggaggcagccattgaatgtgtttgctgcctctattgctgtcgtgtaaggcctggcatagaaagccccatccccttcctctactcttctccctgtggcagcaatcagacccctgcaggacttgcactgagaactggggaaagccatcacttcttgctacctatctttggttatatttctgtcttagactgggatgtgagcatgcttcagactaaagctatttacagttttaattcaacgggaacaaatggagacagctttctgtaccaacttctacaagcttttagatttgaattggggaactctccaacacacataatagaaattatttgcaaatatcagtttcttatagacttgtatcctttacaagcctggtaagatgtgcatgtgatgtctaagacgggctatcagtacctcttgccatctaagtagattatattatttcaattttgacacattttctctcacccttaatcattgatatggctttggtaatggatgtaattgaacttacacatatttattctgtgcttacaaatgttttggccactgtcttaattggttttgatagagtgagcttgaagccttgggtatacaaagcaattaaaaccttttggcattttgcagcagtcactgaagcgtcataaatttttgattggttatgtgatgtacatatttactgaacacaagcagttatgatttatgtgtgtgcagctgggggtagccaagaaaatgcaaatcccttgaggttaaggggaaacacatcagatgctcagtcattgctctcacagctaagtgtttaatcaagctggaaaacaaaaggtcaatttatctccctccctctgtaacaaccacaagtttgcctatttcacatttttagctaagagattttaaaatgagttttgtattattttctgaacactcactggtttcctttcgacagaactggctagtatgttgctgctacatataactttaaagcatccttttgttttgttctattctgttttttttttcctttttttatgggttgtgtttttgagacagggtttctctgtccctgactgtcctggaactcatcctatagttcaggctcagagatccacctgcctctgtctccttactattggggttaaaggtgtgtgacatcaccttctggctactccaaagcatcttaagtctatggaattagtatgaaaacaatgtgaaatggcaatttttaccttgcacttaaatgctaaagcaaagatctagttgcacccaagaatccacgagttcctcattttcagatgtcatgtgttctgggctttgaaagcctctgtggaaaggaacttcctctgaagctaactcatattatgggttcatcagtgtcttctttaaaaagcctatgattctcgctcaatctgattggggcagagattaatcaaggtagggaaaatcaagaacacgtagaatgtttcttagcggactgtacaggacacggttacaaaatagtggatcctttacaatgaacacaggcttaaccagttgcctttttcccaagaaagctgtctgagggggtcagacagtccagccctctggttttcttttgtcttccctcgtggcaggggactcagaggaagcattagcatgacaccttgacttttcctatagaagggatctgtgtggttgcccctgtatggtaggcttcttgggaggctctgggagaggtggtatgtgagaagtggctcaggctgctgaaccgggaggggtggagaaaatggtcctttgctgactctttctagaggttcttgattccttagtgtcattcagaggtggagtcacaaaagagaaggaaatcagggttaattctgaaaaccatctatgaaatctttaaatcccccatatgttggctggacagcagtgaggctcacggtgaagggcagcattcttccatgccagtgtgctaatgattgatttatcctttttccgaattgtggcaaacagatgaaatatacttctcttcttcatagatagaggaataggcaagtgagtccaggttctcagttttaccagctgttatgtggaccctcatctagtattcccatttaggccctgggtctttgttctgctcttgatttaccagaaggaaaatggccaagtcccattacctggttgccagtgagcccagtgcccctttcctagtctctccttgttaattttcagtgcagacaacctgagtgtagtagactcaacaaaaccctcacaggcctcaagcaatgaaagaaggctttaaaaattccctgccatggaagctaattgtgctcttttaattaattgctccaattagtcccactcttctcagctatgctactctataaccctgccatctgggatacttctggaaggtgcaaatgacagtgatggtcaggtactcatcaattaaaactcttactatgtgcaattagcctctcctctggatttaatggctgccctggagagtgtgacaagtagcatagataaggcctggcactattgtgtggaagagtagcattttgttttcattcctatcattttggaagcagagaaggtttattataagtaagttatctgaaacagtacaataagcaatgctttactctgcatataaactgaacagactttttattatatttttctttattacgttttaacaaataacacaaataccaatggcagtagacaattacgaaaactggctttcaaacacctcaactaagcatttaacacatgtgattagcatatttacttatttatttatttatttatttatttatttatttatttatttattacatttaggatttcttaggattgttagcattcaggcatctgtactggcctgctcttggggtactgacaggatacatcctcagctgcagccactaagagcaccacctgtacacattcactatgttccattttaaaagggccctgcccacctcccatctttctctctcttatctctgtctctctgtgtgcttctctgcctgtttctccctccccttcttttctgtcattcctgaggcccatctcctctctccccacctccttcccattcactttcccccaattaaaaaactcctccacccaagctctgtcacatggtgacatttcttcatttctctcacttaacacttttttaaaaaaaattacagcaaatatcacaaaaagtgaagatagattagctatctttgggtgtaaatgggggcccataaaactcctttttctcaagcctttcccttgaatagcgaagattttacaacacaatcaagtttgctttcacctaaagctaaggcagcagggttattgagtaattgtaattatttctatgacacagtctttaaatttatgtgagtgattaccagaatgcagaaaacatcagtatataactcaagcatgttcacagagtcagggacaggtccaggagtaaaccatggccggtggtcttgaagtctccctacatcatctctatccttcccttccctaattaaggcatccatttggtgaaatcatccattggcatcaatctttccactggtgtctcttgagagacgggtactggccctcaatgcttcttgaaagcaattttatttttactgtggcactctttaaaatttttctctctctatctcaggaattttattattgcaggccaaagtaaggatttcttcattctacccagagttcatggaatgccttgaggattgttgcttttcattaatttaggatgttctcagccatcttgcctggatctgttggctttgttctccccacctttacctcccagatctcagaagtacactaagacctctctctgcttcttctaccctcctactttctttacagacttcccaaccttttgtgtccctacacctccacaggagttacatctgttcccctgttcactagttttcttccctacatgtctcttcatctgtgtacagattactctaaaccagtggttctaaaccttcctagtgctgtgatccttatgttataacctcatgttatggtgacccccaaccataaaattatttccattgctacttcatgactgtaattttgctactgctatgcgttgcaatattaatatctaatatacaatatatttgcttgtgaccgggtgaaagggtcattcaacaccccagaggggtctcgacccacagcttgaaaaccactgctctaaaaggataccacgttcatttggttattacgttttttcagccatagaatttttactcaggttttttttttaatttgatatgtccttcaaataatttctatttggagcccaattcacaaactagtttttttattccattgtaaaagtaagcaacattttgttactatgctacacttcctggctatgcgtgttacaccagagaaagttacaattaccaaaaagacagatgaaatcctcttgaattggctcaaggactcccccttctctctcacctcctctccctgatatctgcctatccctacaccccaacactgtgtgtttgtctgtaagtatatgcatgtgggtgttagagatcaacactgaatgtttctttcaattactttcaattctattttttgagaagttctctcaatgcactggagcttaccatctcaggtaggctggctggccaatgtgctccaggcatcctcctgtctgcctccccagtgctgggaggacaagtgtgctccactatgccttgacttttgacatggggtctgggatccaaacacaggtccttaggcttgcatggcaagtactttaccaactaagccattttgcaattctgaccttttcccttataaaaaacattatagcatatactgaaatggaaagtatccaaatacatatgactctctcacctagttttaacaattcatcataaagccagtgcgtgcccctgggataggtctgaactggctggtggtatactttgctcagccttgatacaggaggaggagcttggtcctgtctcaacttggtgtgccagactttgttgagtccccaaggaaagccttaccccttatgaggagtagatgggtggtaggaggttggggagactgtgtggggggagaaggggaggtagggggactggggttggtatgtaaaatgaaaaataagttgttttaaataaaaaaagaggtttaaaaaacccccatcatttagtgactttgaagtttgttgctggtgagtctggtatctagatccactgctgatctttctctactgtctgagcttcttgtaatctcttgcttttgtcttcttgatattatttattatatttagaatcatgttgaataatcacttgtagaaataacacaggatgcttaggagactttcttcctgcaggaggatttccattttctttaattacgtggcagcttgtgcatcagcagtcaccgcaatctagtttcaggtatgaagatggtcccagtctggaattcctgcagtggcccgtctgcttctggctcaacctgccaaggtggcccaggctctcttaccaagcttgtgataagagagcctggtacacttccctccacaatacagcaggaaaataagacaacaacaaacagaaagcaaagcctctcatccaatgcatccctgtttggtgccaagcactgctgtccagtagggatgtggcagctatttgagcctatcaagagtgctacttaccctcttggctgcctcttcctaagctggcaaatgtccccaaagtataacccagcatttgatactatcatgggcagagtacagcatggatgaactccatcttcagagcaatgcagtgtcgtcatatcccaaacaggtacaattgcctctggtctctccatagcaaatactctaggtttccctggagttagtagcaacttctccagtctcctctttggagcttactgcctggcctcagtgctatccatccaggctcaagattgattccaggactaggtttatcttcccatcactacaaggccactgtgcatctctgtgctctgcaaatagctgccacatccctactggacagcagtgcttggcaccaaacagggatgcattggatgagaggctttgctttctgtttgttgttgtcttattttcctgctgtattgtggagggaagtgtaccaggctctcttatcagccatcttgctgataccgctttcctaacccttcacccccagggtggaagaggctttctactactgctcacttgtggggtgtcttattcctgtaggaaaaaatgcaggcatgacctggaggccagcccacctggcacaccagacttctaaataaaaagcatatcatgctcccaagtacttccagaagtcagagcactgaattctgaagtagcatgggtagccaaaagctgccctgttgatgagtgtgcactctgtctccttttacatgctaagagaccctggtggtatgagtgttcattgtccagtaggaggtaatgtgctaaccaatcacaatcaataagtttcctctctgtaagtagtgttcacatacaataaagcagatgccgttccctgagctatctccagagcagttcatctctgcaccccttactgacccacaggtattgcagtcttgctggggatgccccccgtaatgtcaacctattccttttgcctttttaattttttggtcgctgttgatgggttcttcctaacttgaccctatcttaaagatctatgactgttacttacccaccgcttagattttgctatagtatgagagtacttttgcacagtagagtcttcattaccctcagggagaatattttcttgacaaggttaaaggctgcttcctgtgagaaatcacaaagacatgttatttgccaaactaaatgatgtaaaggagaatgtcaaagaaactgattaaagaaaggacccctgaatcactgtgtcttacggtaaagctggggcaagtcagacaacgaggaaagtatggaagagtagtgcagaaagcagacgcagatcacagaggatcagggacttgaactaggaagtttcagggggaaaggaaaaaacttcgttcaggatcttcatgtaaagttaccctttaaattatttccggtcaagctaacaaagcatatgagtaggtttgttactcttgtgcatatcctggaaaaactacaaagcttgcaaacactttcagactatttgatgtggtggcattttcaaattcacttaacaggttggagcttgctggtccataagcttgctcctcgtgggaaattgccctgtcattcattcattgtaaacaagccttgtctgtaccagcgttgctcacagacggttgattgaaagctgtgcaaagaataagagtcaaaaagctagtgagctattacacaatttctcagcgaataaggacacaagatggctactataataagttgctctttctgagccagggtgtggcttgtactttaggggtggggtgggctattgaaacaacttaggagtccgatggtagagtgtgacactggttactcaggtatggattattcatggctaattatatagagttgggaggttgtgctcaagcctgggtgctataggaccagcacgttcttctgttccgtgtgtgttctcttaacatggtagacggagaaagcactgagtctgggcacagatctgagggattccgcttgtggctgttcattctagaacaaaaaacaagacttttgttttactccctcatctatgttaggaggaataatgcagtctttcttactagatcacaaggatgacttaggtatgagtacttagaactgtatgacaattgcagcttgtatcttgcacaaagagctactaactaaagtatgtgagccactgtgcttgggcaggttataaaatgttcctgggagagagatagtagacacataactatgcttctagatgggaaccctgtgacaagagactcatgtcatttccttccttgtttttattttacttttcactttcttattgccactcctaaagttccggcacccaacccctagaggatttgtattcattacacacattccccacatgacgcccttggctctgtgccagaggtggaagttgaaatcagtaaacgcttcctttatttgcgttataactaagtttcatttccttccctcgcttacatctgggaaccttcataatgtatacgttgcattaagtgtacaggaaataacaagtcattacttgctaatgcatccccctcctcctttgggccttattagtaattggtaatcttaaaattgcctttcctaagtgggactcatcaggtattccttgaaccccttctgttacaggtcctagtcttgaacactttgctataaaattcatagaaaaactgctgaaagggaggaaggttccctgcacccttctaactccccttagctatagcaaatgcaacaaatgccaaaaacctcccagaagtcactttatttagtctgtgaataatagtcttttgcagtttgttcttattgtgtcacccagcccctgtaatagtaggcttgatggcctgaatactaattactttgttattctaaagattgcattagccacaggatttctgtgctcccaaatacaaattcccaggaagcaactaaaactatctttttgacctacccccaaagacaaaataaatgctatctatccctttctgtggcttgtttgtttttgttttctctaagccttcatcactttagaccttaccatcctattttcttacagggaactcttccttcctggaactgaagagtactttaagatctttattttaattcagatgtcagggacatggaagtctgatctccttttactaaattcaggcaaaacaacgcaacagttttgccctgcactgttcattccattaagcactttcgactataactgtgcacaacaaatgtaaatgatgaaattgcaaatctcaaagtttattttggagtttgtaggtaatgaacactcagcagtcaaagcaaaagaaacagcactagagatcacgctgaattgtttcatttaagcaaagtttggtcaagcaggtcatagctgactggaagcaatgaattccacaagtggaaccatgcttgtcccatgagaagtcagttcaggctggcataacaaataaccaaggagcaagtagttttagccacagacattcactcttcacagttccagaggctggaggccaaggtcaagatcctggctgatttatttattgtaaggaatcagttcctgactggcagcccacagccttttgcatggctttctttcatgtatagacatggatagagagcaagcttttctgaggatgatcttatgagagtcctaacctgggcacgggaccaacttcgtgacctcgccaagtcctaattaccttccaaaggtcccatgtgaaaatgccatcactttgcattccaaccccactacgtggacttgaaggtaacacagctcagtccatagtaccttaaaaaaccaaaagacaccagacccagctaaaagagaaagtggttgctcaatagagaggacctgagaaaaactatcctaattttttatttatttatttatttatttatttatttatttattttggtttttcgagatagggtttctctgtggctttggaggctatcctggaactagctcttgtagaccaggctggtcttgaactcacagagatctgcctgcctctgcctcccgagtgctgggattaaaggcatgcgtcaccaacgcctgacttcctaattttatttttaacactagccatttagcactaaggtatgtccctctatgaaaatcagtagtttttgagggcatcatgatttctaatattcatagttatagatctaaatcttccatgccctttgtctaagagttcaggaaaaagtggaatcagtttttagattgtttttgtcagtgttcttgaagtgttggcatgcttgctggttgcagtcaatcatctgaaatacctatttgttttaaggaccttgataaatctcatgcattaacagacatttaataagtattttctagggtcagtcaatgggatgccattgtcacagaatactcttctttaagggaattatgcaagagctaacaaaaatttaatgttgatattttggccatcgagaactatctactaggttctttgctacccagagccaaggttgaagaaaattcattacaggcctttcttatccaaaatttggtgtgtgacaaggcttattgccctttaattaaaaaggcactaaaagggtttacatttccatagaagggaggacttcagttgactacaattcttgcaccttggcaaggaccagtgatttcccaatgtgtgcccttttattctcagctcctactcttcctattaatagccatttgcttgtgattgcagtagccagagtttccttatgcctgtgtacttgccaagcaatcagcatccatctccacaataaggtctatattgcaaaaggtccaggctgcttgaagtcaattggccctaattccctttatcaattcctacggtagtcatagccctgccaatgggaccataataattaaaattatttggcaaagcctgcttcctctggttggcatttggaaaggaacaatgtaggagctgatgaagtcctgattggatgtgtattgctgatgtggacaaggtcataacaaggtctccaatgcctaagacccatgtgaatggcaacgcctttgtcaggattggggaactgacaaacctttcctctggtccaagtggcagtgttgatggtgtgtttagaaactctgaaccacagcttcctctctgtgctgactaaactctgggactgttctgcaatggagacctcctactgagattggctaaacccgcctccttgttcagctgcacacaataaatccactccttgttcagatgcatacaataaacccaccttcttgatttagatatttccaataaactgagattctgtattgctgctgtagttggtgaatttccattggaacatactgctcaccagatcccagctttactggatgtgtgccttttcttcattccttcattgccccaggaccaatgcatccagaatgcaaccaagccatgcagtatttgacagaactgtgagattgcatctttctaatttgtttttttatatatatgcctacatgtctgagaaccccctcacctggctgatatgtatcttctttaagtatgttaagatttttgaggtcttgtctcgactgcttggctcctgaggttatgttaaggtaacactgcaggttgtggttatgagccattttatcctgcttttaggagatgccttggtgcggttctattcccttatgtgtctgctcttgaagggtctgactctttccagtaacaccaagtcaccacatgctggtaacttcatgtaccacgtgttatacctcatgcatcagttctgttggggaatactagtactatgtctaaaatacaggtctcaatttcacctgcttctctaccctatcactctatcccaagtttccactttattgattccaacactgtggtagtaattagaatttcctacccacccctagatatatagcaaggccattactagagtgggaatagtctttttttagagactgtttttaggaatgtccatccccgagagataacaaaatcagaggatactcaatttattctttacaggtgttgtatttgcatgtgacctaagcatatttccccttatactttaaattgtctcttttataatgcctaattgaatgttaattctctataactacttgaaataatgcattgtttaggaagtaatatcaaggaaaggctgttgatgtttaatataaatgccccttttccaaatacttttgatctgtggttggttgagatagtggacttgggacccatttagggccagtgggtatgtagttcaagtccagagatgagaatcaaataatgaagggggggatacagactgtctggcattaagtatttaataatttcatcatcaacatccttattcatcaatggtttgctggcctgcatcagaatgcctggctggtgctgaacagaaaggtactgaagaatagtcaagtgctcacatgttgctttttgttgctgtcttattggctttggcagaagtggaaccacagccgggatggctgggacagctgcttaacccttgaatgtactcccagtaactatggcatcaactgacctttctgtgttatctggaagtagataccccagtggagttcatctgtgaatgggtaatgccaatttgcctcagtgttggtgctgtttgactattgtttgcgtgtaaataactctactgttttaacttaaatgactgttactcataagaatgttcaaccagtcaggcagtggtggtgcacacctttaaccccaacactcaggaggcagaagcaggtggaactctgtgagttggagcccagcctggtctacaaagcaggttctaggacagcctccaaagcaatacagagaatccctgtctccaagagaaaccctgtctcaaaaagaaagaaagaaggaaagaaagaaaaaactatcattacagaaaaagaaaaaaagtcccaactagatacataatctttaactacacaaatgtgaagtactttatatcccaaagtagatatttttgtttgtttgtttgtttgtttgtttgtttgtttgtttgagaaagggcctctctaggtagctctggctggcctagagagaactatctatgtagaccaggctggcctccaactcatagagatccacctatccctgcctcccgagttagtggtaggattaagggcctgtgccaccatgctcagccctagatggacattttaaagctcatgctgggaactagatattgaataaggcataggaaatccatgttcagctggcacataatttgttttcaaaaaactagttctggtggctattgcaacattgtgagatggacatctgaacagggcgcctcccctgctggggtgttgttccaggtctgcgttccagtcactagactccatttcctattctttccctcccattttcaatcctatttgtcactgacttttcccagtgctttcatttttttctagcttactggatactggattatcaacacagtttatagtagctcagctcaatcccaggaagttgtttagagaacatgtttcagtaaatccaacatggagtcacctctgacctgcagtgttatcatgtctgactcagttccagaaaagagaaccacctcctgtgacctcttcccctgtatttcaggccataaataggtgctagggccctgccaagtcgggttactgtggctcataagggactgtcagttccttacaaacattgcatagctgcaaaatgactatgccacccaaggtgactcataacatctgctcctcttaaacagggaatgtgagcagtgtcacctcttggctatctatcatgataatgcaattatgagctctttctcttggtgaatgcccagagaagtcctcaggaaccaaagaggacatctggaaaaataatgctagcttacctatccaagacaagaggcagtgagagcggaatttccagaagttttactatattttattttatttatttacttatttattgggtaagggctatagggtcttaccatgtgagtctggctagcctggaactcagagatcttcctgcgtcttcctctcaaatgctaggattaaaggcatatgccattaaaggcatcatgctcagttacacacacacacacacacacacacacacacacacacacacacagagacagagagagagagagagagagagagagagagagagagagagaatccattttaatgaatttgctcatatcattatggagtgtggtgatatagtatttatgatttattaaagcttgcctgaggattcagaattcagaaagcaaagtcagcctcaagctatagagatcagacagtggtgatacacatctttaatcccagcagccagaagctaggactcaagattaagaagaggtagacggatctctatgagtccaaggccacccagatctacacaagtttgatccagttctaaagagaaacagctcacgggggccggagagatggctcagcagttaagagcactggctgctcttccagaggtcctgagttcaattcccagtaacattatggctcacaaccatccattataagatctggtgccctcttctggtgtgcagatatacatggaagcagaatgttgtatacataataaataaataaaatctaaaaaaaaaaaaagagagagagaaacagcgcacacaaagatgatctcagcacctgggatcatgcatctttaatcccagcactagaggagtataaaagataggagcagggtcttcagtagtcagtctcaggcattcattcttcagtcacatggaggataggaagacattgaagtctcaggattctccagccatgctgaggagagacaacattctgcggcttggtaagagcttgtggagacagaatcagtcctttcagtctgaggtagagtaagagctgctttgcttttctgatcttttgcttgaagtttgaaccccaatatctggctctgagtcttttatttttcctgctacaattgagccttgcaaagcccaatttctgcaggggagactaaaaattagctcaggtaacaatttcagtgttgaagcagaattcttttgtgagagacctcagcctctgatcttcacaactttcatggattctgcaagacccatcatggacctgcccacagacccactcacattttggagactaatctgtttttctggctataaaatacaccagctttgagcgttaaaagtatctacaaaacaccatttcagcaatatttaggctagtgtctaaataaaccgtgggccagtgtaggttagccaaagctggcacataaaactatgccatttctgtgtttgaaagaagtaatctgaattctaggttatgttataggagaagaattctagtgaaggtcactagtcaccaccaaagcctttatgtttatcagggttttatgtttatcgcttgagtgctcgaagtcctgggtcttggggtcacatcacaaagctgccacatctgtttttggactactttcttggctgacacaatcttacctggcctcctttattctaatctgttgccctagcttgttcaagtgtgtgcatatttcaaccctctggaacactggaagcaggatgaaaaatgattcatcttcaattgtacctgaaagtgtagcctatgacatattacattttgcacgattctcagcaccaggtggccacacaggtttgggaaacattgcttatcagcccttcctttggaagattcatcagtcatattaaaggcgtcgacatcctgtaacaaaaaagctatccagattgagttttgactttacatttcccagacccctaactgtgtaaacactccctttattttttttcttttcagtatcccaccagtttgcaatttaaagtttctacaaaactcactgaaatccatcaatcattgaaatcagtctcagctatctgttcctgtaactgttaactgtgttgtagagcaactcccccagtccttagaggcttcaaatcatagcatttattatagtttttccaaagtctatagttccccggctgattctgctgatgtgtgttgattaatctcagctttgcttatttatgtatctgtaatcagctggtaagtaggttaagggtaacttgtccagcctttcgacagctcagatgactctgctataacccatatgccactcatgttcttcttctggaaggccacctgaacagaatcatgaagctgatctaagtttctgccatgtttgttacaatcaagtggccagactaagtgacttcagtgagctgagaataggggtggcaccacaagtcatggggcaaagtgggaagttatgagggacattagtggaggccattagtgattagaatctatcacagctattaactataaatctgggaaatggtacccaactgacttcatcagagtagttacaacgcaaaccctccatccccaacagagggccacagaagaattgttacctattatcaatgttacctttctgttgccatgatcaaggaaaattatgtcagaagaatttatttgggtatatggttccagagggataagagaccatcgagaatggtggcatggcggcaggtggcaggtatgtcagctggagcaggaagctgaaggattttatcttccactgtgagcatgaagccgagtgaattggaaattcaacatattcttttacattcaaatgttggtaacttctattggtcagttggggctggcataaaaaacaaaaccaaacctgtggattgggtggctccaatgacagatattcttcctagcagttctggaatctagaaagacaaaattaaggtagaaagaaagttggtaatgtgatggttaacattacactcagacttaatatgcttgagaggccaaaaagcaaaaaaatgcctctaacatttaagccccctgacttggacatgctgtactctaccagctcacttccttttttcccctaacattaaagactattcttaaaattgactgattttgtaaagtttgctgttctaatggtcataagactaactgctatttctgcttttgtaatcaaacttgcttactctgctcaatgactggggcaactgcaagatatatctgtatctttaatatgtattattagacaaactgtgtgtaatcttgtagtttttgactttataagccctaggatatgactagaaactgtgtcttagaaacattctgggttgcagtcctggtgccatgattaaccagcatcagaatttaataaagcttctagttaaatactggaactaaatcagtattaatacgaaaacacctaatttaataatctaaattaatattaaaacatctaatactgaacccaaaacttgagtcagactggtgaatctctgaacaacctcagtcccacaacagttagtttctggtgaggccatcttcctagtttatggatgtctgacttaattccatttctctacatggcactgtctgtgtgtgaggacagggtataggcaaggagggagggggagggaaagaggaaaggagggaaggagggtgggatggaggaggagaaggaaagacagagtaagtacactcacactagggtatcttgcccttttataagtacagggcttttcttgaatataggtcctaccctaataacctcatttaaccttaaccatctccttaaaagacccatctctgaatacattctgaaggggattagaccttcaatttatgaatctggggaaaacccaattcagtcccattacaggaaccaatgcattagaccaacaccaaccataataaaatgctacactccctgctaccaccacttacgacgtggttgggctctgaaaacttagtgtccttccttcagcaaagaggctctcagattcagactacagccattctaagttgctcacaacatcccttgacctcacatgttccagctagattaggcaaagcatcagcaccacaaaagatgtggattgtgtacctcctttaacataatgagcttaagctgggcaaggtggaacataatcccaacattcagaggcagaggcaggcagatctctgagtttgaggtcagcctggtctactgagtgagttttagcacagccagggctcctctgagaaatcctgtcttgaaagaaaaaaattaaacaatgagcttaatgatgttatatgctggaacgctgcaaatataagtttatacagtcaagcaaacctatcaagcttactctggttataaattacaactttaaggggggaaaaagtaagcaaatctttctcacatccctaatgaaagtgtccccatgcaggtgtgtgttttatatctttttttttaatcaataaaggtgtaggtgactactatttaaattgcagtgtcttcctgtggctaaggcattttattttcttgattatatgtattccagtgaatctcagaaggaaaatgttaatggtgtggtgggtaagagttctaagtcctggatgtgaaggcaatctggctgtgccttctatcatcccatgtatcaccagggttgactcggctgacctggctggctaggtgtgtgtctctcctgaagttgtgcgctcagtggaagagggcaatcttccctgaatagaagaggaccagacttcagtcaggggtatatgagtacctgtgctcctctgctagaacctccaaaaaagctctcaagaattctaagtcccactggcttccagtatttgcaaataaagttttattgtaacagagttgtgttcatttgtttatgtaatgtctatgcctgctgtcaggggtgtgtgggggggtccctcatagtggaggttagtagagtccatatgagcaaccagcacagccccagttttactatgcaatcttttacagaaaacatttgctgaccctccccccaccccaaactctaacaaagactggcagatcagcactaactctgcagtaccctgttgtgtgatttcagatgagttatcgagttctctgttccttagatttttcaactatagatacctatcgtattgtctgtctctaaagagtcctgaggataatgatgtaaaatctgtttctaagaggtcctaaagataatatatgagcatgtaaagatcccaggatagggcagagagtaaactaaaactcagaattggttactattcacaacctgtgacaaactacctccacactgaagatgctaaagtatgatatgcttatgattaagaaaaaattaatggttcttttaggcctggctgactcaaatccactgtgatgagggtcctttctcaacacctttccaaaggctttcaaggattccagttgcatgagtgtgcccaatggggttgaaccaacactggcaagatctgcttggctttgactcatttcaggaaaaagaataaattcttagtaagctctagcaatacattaagtttagtttattaactgcacagctagtagctcttaataattcatttgggggaccagaaagatggcttagtggctaagagtgcttgctgctcatccagagggccagagttcagttcccagtacctacatctggcagcttgccatcacctgtaacttccaggggagccaatgtcatcttctggcctctgcaggcccctgcatacttgtggcatgcactcacacagacacctacacatagaagaattaacacaataattaccacaagtatcttttgttgtgctgaaaaacagcagtcagtcaacctaaactctgttttggttgtgtttatagctgaccagattttagtttgcaatggtctgatccttcttctaactggatagtgacagccatccaattcattagttccatggatccaattcctagcttttctgtgaacttgattctgtcctgtggtcactgggtgaacctttccctgtagtcagatgtggtacacaggcccctgaggaggatgaatagtagctactactagtggttgacccgtcataagtttaccccactggaaattttgtctgggcgatgactgctaggtagctcagtagcaccgttttaagcacagttcttgatccgagaggaggtcagcagaggtagctcccagactacctgggttacacaaggtcattggcagctccttcagtacatgtcagctttgcagttatatgggtaacactgaaaatagcagtcatcagtgacaacttagttgttgagtgaggagtaggaagtgtgaatagaaaattccttatagaatctggtagtcgttttctcagaagtgtcttcacaatttttcaaaataaatctaaattaatcattaacccatgagcatggctggaaaggagccctcaagtaaagagactggccacatagaaagactcacttgcctcagtaaactctaattcattgtttcttcttttgtaaacctaacaggtttatttttgtttgcttttgagacagggtgtagccatggtgtagccatagtgtagccatgctggtgtggaaaattatgtaccaaggttggctttgaacttgtggtgatcctgttgccttagcctttcaagtgctgggatgatgagtgtgagccactatctccagctcctaataaagtatagactttgaaatagactttgggttttagaattttatattcataacaatattgaatggatgatagagatttgccatgtacccgaatccttacactggtgtgtcctctttcatctgcctccccactggggtggtatcattgctgcaactggcaagacactactggcacattactattatctacagtttaccatagttcattattgtcctgtgtaccatgggtttagaaaaacatgcagtgataggtattcaggatcattacacctaataagagatgtctctttcccccaatcctggaaaacaatgaccttggcttgtttttctgtcattttgccagaaggtcacaaagctgaagtcacatggtatgtagtctgttcaaacaccctttcacttcctaatacaaacctaagttttctccttgtcattttatagcattatgcttcatctcattcttagtgttgaataatattccagtgtccagctatgtggcagcttatttttcaaggtgtttattattattattattattattattattattattattattattattattagtgtgtctgtctgtgactgggtctctgtgtgtgtgactatgtgctgatccatgaagaagccagaggtgttatacccctagagatggtattgcaggtggttgtgagccagctggtgtgggtgttgggaactgagcctgagattctagaagagcagtatgcactcttagctccagctcccatgacagcttattcacacatcctcctgctaaagggtatcttggttcctttctcatttggggtaaagttgctgtaagcactcatgtgtatatttatatgtgaacatacacattttttttattcttttgggtaaatatcaggaagcacgggtgctgagttttaaaatagaagtatgcttaattctctaggaaactactgaactgccttccaaaggagctgtaccattttactagcaaggactgagaaatctcctgctccacacccgtggtaaagccttctgtgttgttatggatttggcctgttctaagatgggtgtgatggtattgaatttgaattccatgtctctaaccatcttttcataagcttatcacttgtatatcttctcccatgtggtgttaatgtgtttagatcatattttgtgtcaagccgtttttgtattgttgggtgtatgaattccctatgtgtttcagaggacatgttagtcctttatcacgtgtcttgcctgagcatttttctctgtggattttcatttcctggtcttaatatgtattatagaacagaagtttttagttttagcaaattctgcctagttaactattttccctttgcaaattgtttattttgtgttttatctaaaacataattttcaaattcagagttactcagacttcctcctcttatttttaaggagttttccggttttgtgtccatagttccgtgtctctctgagcaatgcctagattctttaaaagaaaaggggtttgcatgtgaattcctagttattcaagtgtaatttattgaaatcttttcttttctacattgtattacatctacttctttgtaaaggttggctatctgtatgcctttgggtttattactggctttcttttctgtttcattgattcgtttctttattctttcaccaaataccatgttgtcttgattgttacaattttataatacaccttgaggtctctggtgtctgtcttcctcttttctgctgtgttgatattatgttgtttattatcaatctttgtctcttcatatcaacttcagaatcagtttgtatccacaatacactcattgggattttgattttggaattgtccttaagtgaagccatttatgtacagtaaggaaaacattcagcactgtgaaaacatagcttgtagatgggagaatatatttgccagctatacagcagaaactataaaggaccccagaagcgggacatttctatttaagatgttattatatctgtgtatgtgtgtgcaggatgtgcagggaccgatacggaggctgaaaaaaaattgttgggtcatttctctcctctaacttttgtgtaaccagggagtagatctcaggtcatcaggtttgtgggacaagcacctttacctcctgagccatctcaccagcccaagaatatttcttaaaagccagttcattcacaacagatccctcagttttgtctgggaaaaatatttatattttctttatctccgaagaactgaaattggaatggctctgaggtctagcttgcttgctcatttctctcaatgagaaatacccacacaacatttcttgtttgtgtagattttaaaatacacattagttatagtccttatctttgctctcctctatagaaaaaaaaaaagaattgtatcccttatctttttttcagtgtttgtaaaacataattttccacattgaaagaaatatgtctatttgaggcatcttttttgttgatgttggtgtttctgtttgtttgttttaatcttgcttggtgttggtgtttttgagtttcacaaatctgtgactttgtgcttgacataaacttagaagaatttcttaggcattattgtttttttttgtttgtttgtttttgtttttagagagagggtttctctgtgtggccctggctatcctggaattcactctgtagaccaggctggcctcaaactcagagatctgcctgcttcagcctcccaagttctgggatcaaaggtgtgtgccaccctgcctaaccaggcattagagttggcaatgtttcttgtgttttctttttctccctcagctgagtttctttatgtacttatccatcttctgtgattatttgtatattgtgctaattttgccactacctgcagatctccatcatcagctcttcctggatgaaggtttattattttttattcctgaccatggagacaccttctaaacatgctgtaacttcagtcaaaactggctggaaatgatctgttcttacgtgcctgtctgtttgtctgcgggataatgatgagacaatgtatcattggaaggaatagaagacataagagtatttatttgtgggcttgcccgcttcttatcttggccagcttctaaaacaccatgtttcaagctttattgtgggaaataacaagaagcctcataaaggaacggtaatgactgtgaccctgctgcccagaggttactgcagtaatacttgctatgatttttctcttgcttcttgacacgtttgttcagtgtagaagcacacccacaggaatttttgttgttctcatttaaaagttgtatcatagccaggcagtggtggtacatgcctataatcccagcactcaggaggcaggggcaggcaaatctctgggttcagtgccagcctggtctacagagcaagttccaggatagccaggactccacacagaaactctgtcttggaaaaaaaaaggttcatggtggtgagagttcttatatgtacagcatataactggtgctaagccttgtacatatatgaaatcatttgattttcattataaccctaagtgatatgatctgaattgttctcatgttaaaactgattaaatagggcctagagaaggaagtgattcactgctgagtaaggatgaagtcccaggagacatgaggtcgcagtgttagttctgtgctaagtgagtttcatcgatactggattttactatttaaattgaaagcatttatttgtttatcagtttaaaaatcaaatgagtttagatggatgccttattctgccatcatcagagacacacggccagacattacacagttagatgtctccatcaaatttctcctctcatagctcagggaaccctgcagaagatggggcaaaaggagtgggaggcacagagggggcccccataacccaaggagaacaaggctctctaaatcaactgagaaaagctcatatgacctcacagagactgaagtagcaagcccagggcctacactgtctacaccaggtccaggtcctctgcgtaaggtactgtagcttctgtttagtacttttatgggactcgtgaatgtgtgaacaagtaggtctctgagtcttgtgccttctcttgggtttcttatttttttttctgctggcttatcttgccaaacttctgtagggtggttttcattttatattattacattttatctcattatgttttgctatctcttagaagcctgttctttttttttattttattttattagttcaaattaggaacaagcttgcttcagatgtcaatcccttctccctctccctcccctcctcccaacatcccacctgcccctagccatccccactccactccccaggcagggtaaggcccccaaaaggggctccccaaagtctaccacatcatcctgggccaggcctaggcccttccccatgtgttcaggtcaagagagcatcccttcacatgggatgggctctcaaaatcccttcttttctaatgagagacagaaagggagtggttctggatgggagaagaagtggaaaggaactgggaggagcagagggagggaaactgtaaccaggatatattgtatgaaaaaaaaatctatttttaataaaaaggaaaaaaacgaattattagactttgatcaagcaaatatataattatgcttcaaaacatgtaagcttccatgtttttgacaaaaaaagtttcttacctcctagaaatcaaagcaaagaactactggcacgtaagacaccacaggacaccactccaatcttgtcactaccctcgtttctcatcatttttgtttcaactgtcccactagtcaatgagtttgtcatgtgaggaagtgaggagcaactatttcactagctgggaggattcacatcaacttctccccccactgcctctccccgacaccctggcagagtggttctgactccaagaggcatggacagcatggcttttccccccatcctgttcttcctaagcgactcaggtggcatcactcatcaaatgggcagacatcaaaatttcttaatggagtcagcagcatctgacaaatgaccatatttccttatcatctagggaggatttaatgtataaagtattgcattgttagttctgagtactaattatgtgtgtatcagttcctaatggtcattttcttacattggtgacttaagtctcctaaaatagtgttctgctagagtattattagaaatgctgaggcatctctatcaaaaaatatttgcaggagcaaatgttagtcggagatccttatacttgtgcactctggtcaagtgttttgttttacactttctgtatgtctcttgattcactaaccctgtataactcatgcttggatgaagtctcaagcacattttcctgtctgtcacaactcttgttcttagaaacacaagacagcacttccattttaagtttcagtacaatttgaacagaaaaatgaccaaacaaagcacaaaaatgcacaaagtccagtactcaatagactgtcaggtagacatctctaggactggagacatgaaataaaaaaagcagaaatgccttgtttaacctctgctgggagtgtgcacggggatgttcacacttgtttgctactgagcacatacctgtgaatggctagcagagtgtcaaatttggagttatggatccattttagtatgtaggtaaatcctcatgtcgataattatagtgaaaaccatgtatgacgaagagacaactccattctcaaaaggtacatgtgaagataatgctgcacatagaaaatggccaccaggcaagctccccagtgataatcattgtaggtgaaccttctgaccaatgctgaccacagtggccagatgtttgaagaacaaagagatttgtgtagtcagggagaaataaaagaaattgacatttactttaaatataacgttgcatgacttatttacccaagtatttgcatagtattagcagatgttggccagcacatgcagatgtatgtgggatgcaacagagctcaaattctagttgaaaggggttacctatagtttgcattctcctaagctggtgtttcatgagagctattgattaatgtctgccaagtgacacttgacactaggaccacttcaaaataggacatatttccagagggagagcagaaacaaggagtcggagtgatgccttgtctaacctggactagaaatgtgctcagagattgctcccacttgtttgcatttgcctcctggagagaggagggaggctcctaaaactcgggaagctactgaagctttccagtgcgacacaaatgttcagatgagcttcctgctgcaaacaattgcaggagaaaggatgctgactcaggaggagctgactatattgtctgggagcactggtgatgtcatattcctggctagtcatccatgccggggatgattttttaaatgaggtagatgcaaagtcacacacacccctttaaggtacatctactggattcacactatagaactgactatgtgtgcatctcctcaccagggtgtaccccaggacagggactgctttgttcccgattaaataactggtggcagcataatcattcacaaaatagatgcttaataaaccacagtcagaaatggacctggtcaggatgagatgggagatggtgtgtgtgtgtgtgtgtgtgtgtgtgtgtgtgtgtgtgtgtgtgtgtgtgtgtgtgtgtgtgtgtgggcaatccttggacatatttttctcacaggctagtgtgaaaccaaaacaggaaccacattgttgctatggagccacattgttacacattgttattaagtctccataccttataagtttctgttttccaagcttaatgttctcaggcgatgctgaacttgtaatcccatgatgtacgtatacccacccttttgccttgttaaactccaaaacacctgtgatgacaccccttccatatgatctattcttgtactttttgaccctcacaggcaaccttgggccctgagtccccgactctagtccaggtgataacagtcaattatttcaacagctgttttctatcattgttaacccttcctcataaaagggacctcaaaagccatggaggggctgctctctgaaatccaggcttaagttgaggcagcttactggccagactaaatagagattgcttaatcagacagttgtggaaatggtatttttctcaggtccaacactagttgttgtcctaattgctatctctaattggcaatgcatacagaagcaaaacccagacatttacagcacatttgggggaaaggagagatggctctgccactaagagcactggccactcttccagaggacctgagtttgatacctagcacccatatggcatctcctaaccatgcctaactccagtaccaggtgatccaatgcccttttccagcctccacaggcaacaggcatgcatgtggcacccagacatacatgcattcagaaacataaaataacaattaaaaaagttaaagtgcatttggttcaaaaggatttacttatttcagatattctagttcggatgtgatcttaatggtgttattcatagtccaattttatgctagaaatcttggctctgtggtgtggtctttggaagcttggagatagcatcagtggggagaggtcatgaagcagtttatctgaaatggctgctggaagtgctaggctaggtgctgagcacttggggcttcaggctgaatcaaatgcattcacaaggttagctgagtgatataacaaacacctcctaaatgtcaaaggctttctgtatctttttccttcttcatgcacatgtatactggctggtgtttctggtccagcatctttcagctggtcagtttcctgaggatgcagactgcttccattttagggctctgtcttcctacagaacttccattcttactcttcagctggtaggtttttgttttgttttgtttttttgaagttatctatgtttttgcttttgtcttactctgtagcattggtggacctggaacattctatgtagaccagggtggtttcagactcacaggtgcttgcctccacctccagagggctgaggttaatggtatgcactaacatgtctggttgggtggtagtttttatgggcgagatccaaagtggtttcctgcctcatatttccacatcctgtgcctggcatcaggtaccaggagaaataaagagacatgggtcaccagctagccagtctgtctctccaacgcagccttgcacatcccctttgaatcttcgtgacatttaatgctttccccattgtcttcatccattaacactcagtagtggggctgaggaggtggctcagttagtaactgtcatataacatgaagaccagatcactgacacccccataaaagccagggtaaggcacacatgttttttaccgtaatgctggagggtctggggtataaacaggcagatcctaggattttgatgggtagagaatctgtctaatcagccagctctgggctcagggagagaccccatctcagaagataatacactgatcattattgtgttaggaatttttctgttcctgtgataaaacatcatgaccaaggcaacttggaggaggaaaaaattattttggttcatggctccggagggagagtttgtagtggcagaagaggcatggtgacaggtggcattgtggcagtgtggcagggaggtagggtggcagggaggcagggtggcagggtggcagggaggcagggaggcagggtggcagagagacatggtggtatggtggtgggtggcagagaggcatgctggtatggtgacagggtggcactgtgacagggtggcaggagcaagaaactgaacgataacatctctaaggtcaagcatgaagcagacagagtgaaccagaagttagaagacagtaggagctttcaccgaccctccttgccatatgtcttcctaaacccccccaacagcaccaccagctggggaccaagtgtccctaggtggtggaatagggacattccaattcaaaccaccacaagagttatagagaaaaatcaagtgaagatctactttggaactcagtctagtcttcttgtcagtattacagtatttggaagtcataaaatatttattttttacatgtgttcattttacatgcattataacacacacacacacacacacacacacacacacacactcaccacagcttgtgaatggaagtcagaggacaacttgcaagaattggttttcttcatctattgagagggttttcagcatcaaattcattcattggatgtcagtgttttattgctgtgaagagatgccacaataattggggcttgcttacagtttccaaggtttctaatatcatcatggtgggaagcatggtggcaggtgggcagacatggtggtgaagaagtagctgagagctaaatcctgagccattggcccagagagaaactctggacttggcttggatttttgaaaagtcaaagctcacctctagtgacactcttcctccaatgaggccacacctcctaatcttttcaaatagtgccactccctggtgaccaagcattcacatctatgagtttatggggtcagtcttgctcaaactaccacatctggcttgcaaacaagcacctttatctgaaaatccatctctcccactctctgatttttcattcttttaccaagcagaaaatgatacatctgcatgattatcaatacccccggataagtacatttagctacttagatttgtaagctgtgttccacatattaatttgctactctctcatgtatcactataatgtctattcatagaacttcttgaaataagcacaggcagacttaagttttaagggcaaaaaaaagtttctcctaaatttaacagtctttcaaaatttggaaaagggtattattactcatgttgattaacagattagaggaactgaaaaccacttatctagtcccagctatctgtgggtgtaggactcttattactacataggcaattcaaaattggaaaccttgcctaacacaagttatctctacctcaaacactctccttgttcaattaactcatatcttcttaataaaagctataatgtatataacttttaagtatgcctattttagaaatgcacaaagacaaaactttaaattctcattgtcttcctttccataaacatctgttgaggtgtgtgtacccttggtctcttttctgtgctcagttgaattaaagatacaaaggtaagttttaaaagtacatctagaatgtgttctatatactacacatctattcgctatactttcatttcaaacataactagagtagaccagtcaagagattaaaaagaacccctctaaaaaatcgactcttgtgtgtcaatggtgtaacgaaggaaaacaaaggagtcttgaaggcatttaggttttgtgatagtgtagtgtaatggttccgtgctcaggcttaggttatgtgcaaagtgaacatgataataggtcactatgtagattaatttctgtgagaaaatagctatagttgggccaaaagcaacatgtttatttgtgaagtaaataaaattatcaatattcatttattccagttttactttataatctgtggtcctggtggcccaggtgtctttgtttatgaaatgtgaatggtaagcactgtcatctacttttcagggatgttgggaggattaagagagcacacaatgaagtatctattagatatcatggggtgtgtgtgaactgaaaggaacacacagtagtcttctttggagcagaacgcgggtcagtagtccttagctgttgtggaatatttagctatgtaaagatgcattacattggttacgctgtggaatatcaccttcactgtgtggaggtgtgtctcattggtgccgctgcctttgttaatgatgtaaagacgtgctacatgtgcttaagctttatttttttaattgtgtaaagatgtgatgcatttgtgttacctgattgctctaataaaaagctgaatgaccaatagctaggcaggagaaggataggtggggcagctgggcagagagaataagaagaaggagaaatctaagcttggaaagaatgagagaaagagagagaaggagagaatgagggagaaagagggacaaacacagagccagaagccgggtagctgccagccagacaagagagaagcgaaagaaagaaaaagaaagaaaggtaaacagccctgaagcaaaatgtagataaagagaagaatattaaaataagagctaagctagaatggggcattcaaaagtaataataagtttttgtgtcatgatttgggagctggttggtgtcccaaaagaaaaagcatggtccactcaaccaagagtgatgtccctatctcactgttagtttggttgttgctatgagcaaattactggactcaaatgaacttagaaaggaattatttatttgggctcactatttgagaagatgaagcccagttgctcaaatcatggcagcaaggaagtagagtaaaaggattcgggaagaggcatggcaagacagagacccctaggatgtgcatgctacagtgacctgctacctccgggtaggcctcacctcctacagagcccaccatatctaaaatatcacaaccagctgggaccaagaatcggccacatgagcttgtggggatatttcatgctcaagtccacctccccaaagggactgtttgacagtctctacaaacacctggtgactataaaagctactactggagtctagtgatcagatcagtgagtaatgctaaatgtcccacaatgcacaggacagtcatacaaagaattatcttccccataatgtcagtagtacttggaagactttaaaagcataggcatgctgttatgtcataaatctgggtagagggttttctatcaaactcatagggtcagaatataacctccctgatcaccaatccatctagcctggagaaaggattgatagttgtcacaaatgatagtaatggcaattgatattgatcgtctaggttttgtttagataaagtatcaaagactgtattgaattgttatagactgatagattagagaaacatagttgctaaacaagtttgagggatcagaggaagagttagaaaaaagaaacaagaaggaggggaaagatgtaactaactataacactaacttttcttcaaccgttttattcttttcattatttctccactgatgaatctttcagactctgtttttcccattgcctccatcctctacaacacattaatagcacaaattgtccacctgtttatgtgtggttggacatggctgagaattgggcactatgcatcactatgatagtcaggtccaaaagaaactcaggacaaatgacttggtgcataccaaagcacacgctggcttccagggttcctcagtattacaagtgtctatagatcttcttggcccacccccaccctaaacttccccagctcctaggcttccctcccccagcttctcattcccttataactatattattccagctatgggctctcttttgtctttccttctggtggggggggggctctctcttagtctctttggtcagcagaaaaataactcagcagttaagagcactggctggtcttccagaggtcctgaattcaattccaagcaaccagatggtgactcacaaccatttataatgtcatgcaggcgtacatgcaaatagagtactcatacacataaataaataaatcttttttaaaaaagtggcatcccaaccttgtttggcatttgggatcaaattgaaaccacagctgaatgttcaaaaatcacactattgatttaagatgtgacgcatggtggtttactgaaatctgaaaatgcaaaaaaaaaaaaaaaaatcaaatttggttgaggcgcaagtacaggatcaattggaaaggagattaaagttttcctgagagacaggtgatctgactgtaacatcataaaaaggaagcataaaagaatttgaggggcaatactatggcagggtaatttgctggataaggaagctgaaaaaataatagaaacttttcttgtttgtgggtcaaagtttctacaataactaggtatttcacaacttcccccccaacccatgtgagttgtttcaaaagtaaagattaaacacagtgaaatctgcaatgtgggaaacccaacatgtcatgcattggggtggattggaaacagacagcttgtaggctaatcaccaggtcatcaaaccacagctctggaatctcaggtctttccctggcccagcctgtttacatctattctctttgttcctctggctgccacttgttttatgatgtttatgagccctcagtagaaggctcctctctggccttatctctcactacagcatctccctggaagtcttttctccaggtcagcttcccagcttcccaccagctccagtgggctcccacttccttaactctttacaagccacacttctatgtggtctgtctcctctgggtttcattttttaacaataaacttagaattatttcccatgcatacttcacactgaatggactttataggggaagatcaggaagtgcatgactgtccatcgagatccctcccctaagtcacagagctactgtgtactagaatctaggcccttacaggaactctgcacatagagtctgggcttaacctagaccctttcctggaatgatgccagagtttgtgcatttctttttcccactagcaaatgtatagatagactcctttctgtctacagatgggtgaatgttagtaaatagaaatactaaagttctttgtattttatggcctgtttgttgccatctaacagatactggggataaagctttaagtctttgcctttttctttctttaactgttcaagatgagagttaatgctgacatcatagtcagagtgagcttatcacacatgtttatttctctgcagtactctacagaggttttgggtgtacactaaaggtaagggaccacatttagagaggtccagctgttattatgctgtgtgttgcattttctgaaggtagaatttgtcagtattgaaatgtttgtgtgtgtgtgtgtgtgtgtgtgtgtgtgtgtgtgtacacctggcacactccatgcctgaagaggtcagagggtctttgatcccctcaaaactggagttataaatggttgtgagccacttgatgtaggtgccaggaactgaactgggtccactgaaggagtagaaattgccataaccactaaacagaactccagcccctgaaggtggacatttttgccctatctttcatatttatgagcctggcctgttccaggaacatggttttttcttaacatatgctcaccaaagcaaaggaactattgttcccctctttctctgcatggtctgtttgccaagtttataacaattttcctttctctggaaactcagaattggtattggctagtccttccttgaactcctgcaccaacccacccccacttacacttcactgaccagagcgggacctcgcctgtatccaggttacatttgctttgtaagattgagagaccgagggccagtttatgtggcaaagcccagatcacataaacacaggagctgttctaaccactctgtgagttaagagaaggggaaggcagccttcaaagacaaatggcagaagtcattgcacagggaggaatggacagaaagggggtgagaatccagatccagagggattccaacccatttctgtcttgggtgcatttctgcagtgtccacaagaaacctctatatttttataacacattccctttagcattaaagctgatgtaagttaactttccttatttgtggcagaaaaaaatcctccattatatcaaacacccagattcaccgtttcagtgaaggaaattgtactttgcagaaaagtaaactcaaggggagtgatcagatatgtttttaaaattataaacatgactggagactattattgtgcagtgacaggacgcttacctaccacatacgaggccctagcttgcctctccgcactgaaataaacaaaaaaccccaaaccttgtaactaaatcatctgggattcttaaagcactaaaatggacttggatttcaaaggattggtaaaacaatcctgaagggctttatgcatttgttagttttgaagcaataggaagattttccttaaaatgaagaaagaaaaataaatacctgaagaacaacagacaacattaaacaataaagccagtaacccagtagttcaaataggacaaggtgagatacacaagttgtttcttgactctttcgctgtgcagtcttcctgttcaacccgtccccaaatcctctgtgtgttcatccatctcacagtctcttgagtttgcctccacccacctgaatacactgtgaattccagcagtggctgtctgtagggagcctgctgacaggcgctcttgcactcttgccattggtggttcagctccctgtgagttctgagaccttctcaacttcttagttgtcctgtcaccacttccaagtggaacttttaatgactgtgtttacttttcctctgtcaagtcccatcaagcacacctgtccggcctcatcttgctccgctccctccctatccataccctgatgtgggttcatcctaggtccatgcatgtcagcttcttctcctctggggctgttacacatcttatttcctcccctggaatattcttcccgtcaccagctttccttggaccctgtcactagaaagattcctgctactttaggactgtgcgctcatccttgttcagttgttttggtcccagccactaatcgtgtacctaacggtgtcatcaagtatcaccgagttaataaacgcatagaacggtgaacccagtaaaaactgagcagaggaatagaaggaagcttcagcttagtttttgttttcagacactgaggcataattcgcttgtttagaacttacagtttcttttagacaacagatgacacatgaacatcaatagtagtaatggtaatattaatatattacttattataactaataaaatataattacaaacaccaatgtttaataatcaatatatcaacattatcattactaatattaacataaatatttcttttacaagtaagaatatgagtagatataaaagtattggtatataaaacattattattgttagctttactcctagcaatcctataaagtataacttaatatcttggtgctggtagtagtagtggtagtggtgtgtgtgtgtgtgtgtgtgtgtgtgtgtgtgtgtgtgtgtgtgtgtgtattttggctctgtggaccaggggtcaacattatgtggctttcatcaatctttttccaccttaatcttttaagacaaggtctcccactggacctctagctcactctggacagtgagatccagagcgctgcctgtttccactttccccacactgaatttcacagatatgcattactattgttagggtttcaaggtggaaggaaggggtactttggtggattggagccaaggaacaccacaaagtcacaccatgcaacaggcctccctcaagagatttattggggaagggtggtatacagaggctgcctctgagagagggtggaagggaaaatgagcagcctatggtgacaccggttttttataaaggggtatagcacatgtgcacagggagaatacatgacttgtaacaatggaaatgtgtcacattgtggtggctggtgatgatgcctctgttgctgaaatattgaaggtggatttggggtggggttttccaacaactatagtgcccagatttcttgtgtgggtgctggggatatgaacttaagtcttcgtgctcacgtggcaggtactttactagctgagacatctccctaggcattattgaactcatatcttcaagacagtagtttaatccttgacatctaagtccctgtgactcaggagggatgccagggatatggggaaaagaggactccaacagtaagcatctcaacagaggcgcacagaggaaagaggcccttaaagccactgctaaggtctgcagttctgacagtgagcctgagctggggcagggtgatggggggatagaggggagccatggggaccattgaaggaacgagttaactcattgatatgactggctaggtctgtttgcttcttctctacatatgcaactgagagtatgtgaacgtctatggaagacagcctaccctgcggggggaagacttttctatggtccagactacagcagtaaccaaccgtacacttggtgaaactttctgtaaacacttcatgataagaggaggaagatgaaagattccagagattcaggattgttccaaagccttctgataaggagagtaaaggtaactcgtggaggtgatgacagacgttgatcaccagcgagaaagaaggttgagagtcttcaggcaataaagacaaaggaagggagaacacacaagcttcctgcctgggagccaggaacacacacagaagctgctttcagtggtcaggctgtctgtcgaatattcccagagtagagcttggtagattggtttcttgtttcagataaatcttggttgagaattaatttccttttggaaacaatagtctggctgagaagttaagaaaagtctagcacccagaaaatgtgcaattatataattatattgtcatggttcatttttttatgaaaccagccaagaccatataccctggaaaaatattttattgtttaaattgtaataaaacaaaggctggagatgtagttcagttggtagaatacttgcctggcatgtaaggagccctgggtttgagccctggcactgcgtaaacttggcacagtggtgcatgccctgcaattctagcacctgctctcaagagaaagaggcaagaagatcagaagttcaagatcatcctcgactatagaatgagttccaggcaaacctgagttgcatgagacactctctctaaaaaaacaaatagcaaaacccaaatctcaacaaagagcgtttcctgaaattaaatacaaaaaatgctcacaaatgccatccttgcagcacgaacaggcattctgatgagaatgtattttcaaagaattcatcaccaccttccctttcactcaggaggtggcctcttatttgcagctgtgggatggaaccagtgaaccaaacacttgaaaccaatttgctggttttcgaagaggttattgattctcgcagcatgcatctgcttagaaaatctcactgtttaactctctgtgtgggtgagtcttgccacacattacattcagtcaggcagactgggtatggtgtgtggtctgtcctggctttattgacgtcatcagaggagttgagaaaggttgaacaggtctgaatgtagccttgagttaaaaatacctctgtgtgctccaagggaaatgtctaccttggtgaagggtatttattacaagggtatgctctactttgagagaagatgtctagagagacatttctgggcatcttgtacagtgcgcagaagacaatggtagtgattgataaacacacggttaagaaaatacattgctgggtcttgtttgaaactagaactgcttgagatgttggtgatttatggcttttccgaagcccctttctttgtataacagtcatagtttagtgacccaaatctgtattcttccagtagaaggcaacttcctttatcatcactgtaaaggaggatgggaggggtctagagacacacatgcccactgcaggatctcacgtggcttggtttgtatgctttactacatagtaaaggttcaagtaagcaacagtcaactacaagtgggtgaaaatgaacaaaaactcagcattttttaggtgaacatctgcatatagctcagaggtagagcacctgttagcatgcagccctggtttcaaccccagtgttggaaaaaatgaaagagaatgaaataacaagataaaatgagtgcattaagatgataaaggtacacactgctcattgcttcctctctcacttggcaatgtgggacatatccgactctaacttctaccttcccctagaatgctattattactccagggaaggccccttctagcaggaggcctgacattttgaagctatctgagtagcatgattaacaagaagaaattatttctttccccagtgactgttggcaaaatgatcattatgagtcagttggctggcacatccatgacacacaggaatcctttaaactgtggcaagggagaaactcccgtctgttctctggcccttgcttgtgagcacttgtggtgggagaaagtcatccccatgggtgtgcaccgactcaagctgaggggcccattctaagaaagagttatttttagaaactccagggcttcacctggagaggcaattagtgaagaaaagaatccaggtttgtttttctcaaatatctgaaaccaaaacccagacacaacaacaaaacagagttatttctgtttcaggtcttgtagttgagagacaggaatagagaaagagagagaggaaaagggagagggacagggagagagagacacagagacagaggcagaaacagagagaagaacatagtttaaactagaaagagaggaacagaacctgccccactccaggaaaaaaaaaatcactcaagcatctcatccaagacatgaggcagggatgggaaactcaagcagtagggcagggccaggcatgaacaagccacactgaagcccagtagcaggatgaggtgtgtgagtacacgcagcttgtcaagcccacagcctcagatttcgggcattacattatggtttcggcaaaggctgtgcagcagaccaccagttacacaactaccatgaccgttgcttgtcacatgctttgataattgaagcttaggatccttctgctgaattccttaaggaaacttgcagagaatcattagtgatgtgactcctgaggaggtaagagtctctgcttacagatgttaaggtcgccttgtcatattacctccagcccagtctacagcagccactaaggaatgacatgctgagacacaagagcaaagaggagtcatttattcctgtgatcgaagaggtggaatggcatccccaagagagagaaagtaaatttaaaggggtacagaggacatagttccaggatatttttaatataagtacctgtcacctcttccccaacagctcctggcctctgcttctcccctcaaatccattcaggaattattatcctttgtgtcagaaaagcttcagcagagatcagggaaaacagactttgattttgaagttagggccccatggacagctggtgcagaaacggtgagggttccagctctaaaaggacatgagatttccagaagtgctgataaagccagtgaggacagagagggagaagagagctggtgcatgttggggaggtcgtgggatgaaggagaggcagagagcactcagatgctgtggccctcctttgctccgacgctccatatcctgctccccagagggaacagtgctaggtgacatcatcgaaatggtttggagttgccactggttcccgagtagaacccaatgtgaccgcaaacctgaaaacccaagtgggtgagtgctttgtaggggacacatgatctaagcccactgcaacacagaaagcgattgtttgaaccagccttctgtgctcagagtatcagcagaatggtgacaaagaacccagagagtttcctagaagccccttgttatgaaggcaggataatctgtccttctgtaccaatagtcaagagaagacgtgtgaaacatggaggagtcctggggaggaggtggctcaattgcagagagccgccagcctgcagaacatctcagccaaagttgttacagcacacacacagagcgacaggcactcctccactgtcctggtaccaaataagcccccaggaccaatagtaaggatgagcactagacctgagtgatgttaggctcacacactgaaggttggctgtgggtagataaatcattgtggaaaactaaagttaaatctcttcacaattgagtgtgtagaatgagatgtaaactcagaagtaaagctggagagatgcctcagcacttaaaagttaagaggaccaaagttctattcccagcactcacatagggttgttcatagtcacctatgactccagctctgaggcatcttcaagcctttccgggcatctacatacacatggcatttactcacacagacatacacatgtacaagtaaatgaaagtacaaaaatgtatcttaaaaagtcttttgcaaactgctggctatgcagccatcaccacctcagaagctttctccgattctactcatttaggccttgggaaacaaccatcagatcacatttcttcctgttctactgacagataaatgtaggctcgatgaaatgaaaccaggggaacccttggaaactgttcagctttgcctcgggcaggttgcaccctcatttttgtgcacccttccttcgttcctccaccacaagttcctctgtcatgtgtgtccccttaggttagtgcagtaggcaacacttcagtctcatgtgtgtcccctttactgatccatctctttgcttttgctcagaccactcctaatttgcatattgtcccttccttctgtgctttcgccatcctttccatttcccaggcactgttcaaattcacctgttcataggcatttttttccctagctaccccacccattcccatacatttagcacttcatacattcattatgtccctttatctaagacagctgtgcagcctctgtgcttagttaagttcatgtcagttgctggaccgggaaccccagatgtgttgtgatttgtgtgtccatggcaccatagcatcctgacctgacagacagtgtggtctttgggatgtatgtgtcaaactagattgaacccaaagttctgaaacatggagttagcggtgtgtgaagcagtgcttggccaggtgtgtgtgtgtgtgtgtgtgtgtgtgtgtgtgtgtgtgtgtgtgattccacgctgcttttcttctttttctccaacttctttctctttcttcctttttcttttttttcatatatgcaaaatagcagtctggtctacagagtgagaaccaagacagccaaagtgtctttgtctttttcaagataagccctatcttgaaaaacacagcaaaaattgccaaatgaagaatgagtggcatgatcacctagctcctataatatctatgctcttctacttgtcatttctatccatctgtcagcccagtcatccggtctcattgaaaaactggagaattcaaactttttcagtgcctgggagccctttggaaccagatgtgggattaatttcctcactcaatctgttgtctgtatgtagctttgctgtggttttgattttttctctctcttaacctgcatctgtctctccatttataaattaggggtggcatcattgcctgacttgtagaatatggtgaaagccaagggagacggtgcaaataaagggtctggtacccgaagtgtattaagccaacggggatgtgaggggggaggcacattgcttcagccatcaggacaattgataaaaatttggaacctgggccattcttccttctagcctctattttgggtctggaagaaaaaggactgcacagagactgtcaatcttgaacaagttacctgccttagacacggcaatcgaattagaaatctctgcaaaaagaaagccacagaacttgcaatcatctgcttaaacccagaccagactggcggcagagtcaatgcttgtgcaaaatgtagaaggactttgctggaacttgagatgagtaagggagaatgtcagagctctccacagccataaaacccagctcctgagccccttttatgctgggatttgcatatttctgcaaagtataagccctcattaggacaatcctcaaaggaatattcctattatggagccatcttttaattaggcttcagatcatcttgcccctgaaatggccctgctgggcgatggctggagaacgcaggataatatcacattctctggggctttggaccagaaggtgtttgggacactggagggttggtaaaagaaaccctcattcctgtttcctgcctgtatcaccactgtgcccatccccagggagggccatcacagcttccagcacgccctttagccaattgcatcaaggacacaatggcatgaacattcgtgctttgaatgcaattgtggaccacctacatgaggttttctgtggcaccctcctgaaattgtggtccaccccacatgaggttttctgtggcacactcttgatattatggtcaatctgcatgaagttttctgtggcacactgagaattgggcctcttaatttcaaatttgtgttagtgtgtgacaggactattgtccccaggtaaactagaaaatgtctcacgttcttctgttcctggtggtctgggataaacagaatggctccttagtctgtgcaactctggaaaatgcatattcttacttcttcctgggcccacacccttcaacctcaggactagtgtcactgggtataaagatagcccagtgggatctacactttaaaaaacgccctacagattatttcagcaaggtccctaactccctgttagctgggcatagtgacatacacctttaatcccactcagggaacagaggcagatggatcactgtagggtagcctggtctacaaagagagttccaggccaaccaaagctacatagaaaggccctgtctaaaaaataaatagataaataaataagtgcctttttgattctaaatatgtatagttcttcctaataaaaccagtttgtaatgaagtctgtctaattttgaaaggatgtttattttgttctctattttacttatgtatgtatgtgtctgtaagtgggtacatgcgagttcagtgtctgtggcggtcagaaggatcccctggagttggaattacaggcagttttgagctatcttgtgtaagagctagggtccttagtaggagcagaacatgctctcaactgctgaggtgtctctgcagcccctaaataaataactctgtgtgtgtgggggggttgttgttgtttttgtagcactagacagtaaatccagagcatcccaaaaggtaggcaaccaaacattctcccactgcagtccttcctagctccaagtatgccttcttttagatgcagagtcttaggcgaccttttcattttctgctgtgttttctttcaactaagagaaaatgaactgaaacaaggaaattgggaaactttctgagatagagaagattggctataaaatagaaataagggaaatgccaagaactcaaggagacttaagtaaagaaatgctctgaggttatcgcagttgctgggaaactgctggggttatcagcaaaggggatggtcaaggatgcagagacagacatgcaaagggaatgactgtccttgatctgttctaataaaccatctttctcatttcattatttcagacatctgctaagctggtgccattgggacagaattatcactactcatacttggtgaatgatgttattagtcaaggtggcgtcactgggtacctccaatttctattcttcactgagagtttcagccagtcatactgttcacagaccatttgcaggaaaagtaaaaaaaaaaaaaataagtttctgttgttgtctgggagtctagtgatgacatatggtgatggttaggtttccttccttccttccttccttccttccttccttccttccttccttccttctttccttcctcccatattgtaaaaaaagggtgttagttgcttagaaaaaattctgtatgttatcatacaacatttcaaaaagattaatctctctcctctctctctctctctctctctctctctctctgtgtgtgtgtgtgtgtgtgatttgtgtgtcctgtgtgtgggtacccaaggataccagaagagggtgtcagatcccctggagctggagttacaagcagttgtggatgttggatctgaactcaggtcatctggaagagcagcaagtgcttttagccactgatccatctttctaacactgcaatttttaagatccttccttccttccttccttccttccttccttccttccttccttccttccttccttccttctctgcttcctttccccatcctctgcaggtgtctgtagaggccagaagaggacattagatcttctggagctagaattccaggtggttgtaagttgcctgatgtgggtgctagaaccaaattctggttcctatcaagagcagtaagaattcataactactgagccatctctctagcccccacagtaatgcaattcttttaagtaattatgttcttaatgctttcaatgacactgacacaagtgttccagttctgtttgaaagaggactgtggggcatctgactgtaaacatgaaaaggtacagggcaaagtgtaattgtacgtattttctcttactggtacataatgtgctgttaaataaaactctggtggtggcagtggctttcagattcagtataacatggaatttacaagagtatagattttcaacctcaaacagtaccctattcttagaaacggttactatccagaattgacaagtgtatagaaaattctagcaggggacctagtgatttatatatgcctgactttcatacaacctagcctctgaggaagaagcaagaaaagacactgtatatctaaagtaaactgacactcaccagtctctgttctttacaagtgcagccacttacagaagtcagcaatctgggccatgtacagcactatcccctcattctaaacttggggctggtggcagtcattgagccttcttctaactaaccagtgctggcgggtctttggcctttgttcctactaagttctatgatgctggtattgagcagaattgtgtcacctgaaagacttactcctctagacttcagtttgtagaagacactgctgtgtttttcctgtaccaccatcaagactgccaacttaaaaattgcctacaacagtcttttagctttttgcctctttctactttgacatttgccattcacatcatggaggtcacttaacataacagtttacctaattgtggcatcataaaaaccatatgcttctagctttttcacaaaaacacatcggaagatcctagcaaatgccttgtgaaacaccagctgtcaataatcgagatctctccatacaacatagaaatctatataactagatcctgaaccaaaataaaaagtaaattagaagagggaagtagaagaaacatctgagtgaacctggtttgacttttcagtgattctctgctttatttaagctgccacagacctaggtattgcctggtacatagactggaaaaatggtccataaatgcttttagatctaagaacagtatgtcattggaaagtacataaaaaatctgtcttcctggtggctcttgctaggggacagtccctttccacctatcaagggcatctgttttgggaagccacctgcacagcttaggttgctatcaaagcactgaactgactcctgcctaatcatgtaaatattattgctgaagtgaaaacatgactgaggctggtggtgtgaaccagatgcagaaagtgtcaagccttttatgtaagccgttaattaggcagcatcttcaagtctggagataggtcccacggtgttaatcaagtgggaaatcaccagctgctaaatgaacaggttctttccagaagagtcccctccaccaaatgggagagggatgaggcagcgggcatcttctgaggctcccatagctaagaagccctatagaagaactgtgggaaagcgttaaacaggtaccactgtaacagagcaaataacattgagtcagtgttgaagttttggggaaagcctacatttgggagccacatacaattgggttcaacccctgattctccttttgctatctttggaaaaattaaatgaacagagtaagccttagtttcttcaaatttaaaatggaggagacaacgcctccctgctgaggtttcataaaaatgggaattacaggcaatagccagaggcaggcaggaggctaggaccatggtgatggtattgatgggagtgggatcggcttctctctgctgctgctttagcatctctgatgtttatgtgttaagagcttgctcttgctttctcctgaaaaggcagaagagtgctgcctggttctagcagacatacttcctactatccagacagggaagagatttggggaaatgttatatatgcacaaggcatgcccaggagcaggaaagtggctcctaactcacacttgttattttcacctcttgttttaaaatcccaatgtatatttaatagcatgcaaaaatatgtctgtaggtaaagagtcacaagctgggatggtggcccagcagcaacattccttccagctctctgcccgtgagatgactgctacacattctcatttggtattcacaccccaggctggattaatgagcaaagtgagggggagtgcctttctcctattcaaatttggcttttccttcaataagagatctcttcccaaattgggccaaaccaaagaagttgagaaaagaaccactttacagtcaagactctgattttccatactgcttactcacagtgactcatgcagtctcaaacaccacatcagtctcagctttgccttagagaatgactgtctgcagcaaagttatagtcacttaaataacttggattttgctcattcaacatctctgtttcaatgccaagagggaaggcagtgacaatgacaacaaaagagcaatgctttatttttaaaaattggaggtttccatgtgctttggaagggagtcaaggccaggcgtgattgtgagctacctggcgtataggctgggttgccaccgtcccttcccaggaaaagtgcattctcacacacccccaaattgctaggccactttagggggataggcacggggaagaaacatatccacagggtggaactgattaacgcttgaatggatggtcacaacgcatagcagggctcaggagaggaataactgtgggcaggaaacgaagagaatgtgaaaagctatgacagcgagtggaagacagaaagcagagtggcctgaaagtttaaatgtagatgccaagaggacactgaacaggaaatacaatgagcaggacagaaatgagcaggaatcccttggtgcctgaaacttgagagtctaaccttctgaagggctgaagggctggaagctggctcttcatggggagatgagtctgggggaggagtgagagagggcagcacgtagtgaggagctggaacacgtcccattcgctcctacggagaaacagggcatccatttgaagcccaaggtgcttctgcagagggatcgatgatttggagaagtctgatagagaatagtcaagctggatgctctgaattctgtaaaaagctatggtgtgtgtgtgtttaggtgttgtgaaggattgtagtgaagttcatcctggaaatttgcaagagttctctgtggagtatagggagcaagctggatgcttgtgaatacacaagatgccaatgtgagacccccaaacacaaaattaacaatatcattcccaaacctataagctttccccaggggggaatgtcatagatcaccccagtatctttagcccattggtaaccgaagaagcaaaaaagtttaaaaccaacatcagtgcatttgagctagatacagttcatcaccaagggagctggtatcaagaaggacatcacattggaaactaagttcttttaaaaagtgcaaatcatggaagccacagaaaattccagcaagttttcagggaagacaaataactggtttctggacacatttccaccctgaaatgatgtcattattttatatagctcatttcaagtgtcacacatcatctttcagtgctcctaagttcccaaggggtaagcagttaatgggagtctagggcattgtcttgtgtccaacctagagtgaacctaaaatagaactttgtaaatattgaatgaagagtgacatattagacttaaaatttggcttctagagatagaacactttggcggggaccatggctccatcacatatcagctgtggaaactggggaaaatgccacctatatgtatattatacaggcaactgctttctaggaaagtcttgaggatgaaatgaatcgatgtcaacctcaccagagtaaacattctgaatgttaaagaaacacatggctgaatgtgctagttagctttctaccactgtgagaagatgcctaagaatgttgctacaaggaagggaaacagtttcttcctccctccctccctccttccctccctccctccctccctccctcctctctctctctctctttctctctcttctttctttctttctttctttctttctttctttctttctttctttcttcctttctttctttcttattcctggatatcagtttcagaaatttcagcccacagaagattggctctgctgatttgtggaaagatgattacagtgggatcacatggtagaccaaagctcatagtgtttgggaaaagaaaagagagacagagactgttcttccaatatccacttcaagaacagaaccctaaaggcctagctttcttccacttagactcactttggaaaggttcaaacacccttgacctagtttttatcagacacagttggtataacaatgtgtaagcagtatctttcttatgattagttttatgtatttttgtttgagttcccatatcatgattatgaacttatttaagaattaggagctgttttcataggcagctcttgataaaaaccagcatccattcctgaggtgtctgccttttttactttttattttggcagaaaaggtattttccagattattgtaggcactgagatgggtatgatctttaagaatgatatctgtagtataagatttctgggtctgaagtctcactgaatccaacactttgagaagttgcttaatttcattgagctcctgtgaacctatcataaaaatagggaatcctagctgagttggtgggcacacacctttaatcccagcacttgggaaacagaggcagatggatctctttgagttcaaggctagcctggtctacatcgtgagttctaagacagccaggctatgtagaggcatcatgtctcaagcaagcaaaccaacaaaccaaccaacctggagattggcatactatgcttaatgactgattttcacttacttatttatttatttttcttttgcaatatgatattaccatggatcacaggctatgtatcacatcctccagcctctgtttcttgaacaataggttgagataccatgcttagttttgacttataatactaattaagtagtttccagaagagactatggaaatgaaaggtaatacaaaacagttttatcttggaaataatacaataaacttctggaatccacttttgcaatgaaaatgtgaagggttcctatattttccatcttaggcagacattaaagacactgtgagagtatattcagatagacttgacaaacacaggacctacccatacccctaaccaggattgcagcagacattactaatctatgtggaacttctatccactgagttcatacttgcttccaaagttttctccgcacaatattctagacattgttgctaatttgatgggtatttatgatataaataactaaaattcttttagatgagttgatttataatgatgaattgattagatttgtagaaagggaaccagatcaagtattgtgggtgatgttcattatagaccttgtgtattgttcagatttgtttttattacgtatatatgcatttcagtggcaatgatcacatttacaaaaacccaatttagaaaatgattactccttctttttatttagttttgcttttatttttacttttaaaaaatgataatataattgtgtcatttctccccattttttttccttcaactcttctcagttctcctactcacttttctcgctcttaagttcctggcctccttttgttttattattatggttctatgtatttttgatgcataaatatataaatataaccttctgggtccttttagctagtttgtttgtatgcatatgatttcagagatgaccacttgacattagataacttctttggaggctctactatttctcctactctcaacatcttttaagtgcctgtagttctttgtcaatgggtgggacccaagagatttccctcttctatgtctattagtattgtccttgttcagatcttgtttagacaaccatgttgttgagttatctcaggtggagcttccctgtcacttccaagagtgtagaatagaagatattctatatgtagaatatagaataagatattctatatgtagaatagaagaaatcacatagaagatttcctgttcttgggttcttactatctttctaccccctttctgtgatgtttcctgagccttaagtgcctgtagttctttgtcaatgggtgggacccatgagatttccctcttctatgtctattagtattgtccttgttcagatcttgtttagacaaccatgttgttgagttatctcaggtggagcttccctgtcacttccaagagtgtagaatagaagatattctatatgtagaatatagaataagatattctatatgtagaatagaagaaatcgcatagaagatttcctgttcttgggttcttactatctttctaccccctttctgtgatgtttcctgagccttatgtgcaggaattatgttgtagatgtatccattggtcctgggcactccatgctaagttactttctgttgtagttttctttaatggtctcagtcttatcaaaaagaagaagaaaactatttcttacccttatccagtaacgtatcttcagaagtgatttttttccctgaaagatgaagagtgtttatgttttcaagaaaagtccgtcagaaatgatgatgggtaatcctctctcctatctttgaataaacagaatgagctacataaaagagagggaaagagtcgactggcaacatccacattctactactgtttgtgccactgtggaagatgctgttcaggcagatgacatggaaagctatgattttttaaaaagagatttgctacaatctgaaaaaatcattttggatgtagcttctgcagcagttgactcagtgaataatttcctggaatgatagcctagttaccattgtttagtgcatcttacagctggatgccttttattgtaccttggaagaaagatacaaatgacaagtgggaagattggcttctcactgctgattggtttatagacattaaactccgcatctggcagcatcttgtaatcacagcattgttacttatcatcgaggggccctgttcttcaagagggtgtagtcatcctcattatgcagaactttagaagactagaaaaatccgtgcactagagaaagttctagctcttgccactcaataccaacagggagatgtgtccaatggggaatgacagaagattaggagggtgaaacttcaaagaggagaagattcaggaagttgggaagagtaggaagagatgctcgattaattattgacataaagatacagaataagttaactatggtaggcaaaattgagaagctggcatggacctgggctcatggaaaccctcatctactgctattggggtagaaaatggtatggacactccagtggcagtaaaaattagatctgtgtttattctctgatacagctggccaaatccataaagctggccagacatctaaattcacaaaggaatcaccaaaatctccatatgccttctgtgtgagccaaagaaggaggtgccccagcttgcttgggacagtgacaataaacaactctggtcttggtttaattagtaatatcactctctcatttcaagaggctacgtgtattagttacttacctcatcactgtaaccaaaccagctgatgacacgcaacctaagagaagaagatgttattctggataagagttaaggggggatagatcgtcatggtaggtaagccatggcgacaggcaggtgagatgatggtcacgcttaacccacagttgggaggcagagggcagacaagaagtgataatgggctagaaagctttaagaccctccttcagtggtccagtccttctagtaggttctgcaatcttctaaaatggtgacaccagctgggaaccacatgagcctatagagcctattctgcatttaaaccacagcattcctttcacggtctccaaaggctggtggctgactcctcatacaaagtacatttagtccaatctaaaaagtccccctaggctttaagagttccagcattattcaaatatctcggggatggagaggtggttcagctgttaagagctcttgttgctctttcagagaatgaaaatttggttcctagtacccatgtcaggcagcttataactgcctctaactccagctccagggaatctggtactctcttttggcttccccaggccctgcccaggcatcatgcatatatatgcacacagaagcatacaaacaatatatatatatatatatatatatatatatatatatatacatatgtatccataggaactcgtgggagtcccttttaaaaaatatgagaagttacatatttccaatatacagtgacatgggtaaatatttccattcaaaaaaggaggcactgggagcataccaaacaaatttagaccaaggcaagaactaaaccagccaggccaaatcacaaattctacagctacatatccagcatttgggattcataataacactcacctggactccaatggccctggttagccctgtttcccagctcttctacctacagcacacaaggcttatctcttgggccagctacagtctactcctgctgcttacattggaagacagcatcgccatcattctggaatctccactgtaacttagacttcaccttcacagcttcacaaaacatcttttttagggcctagcttcagttgtcttctggaaccttgtcacagacttcattgttccctcactgttgcatttcacatgcctgtaaagccaggactttgtggatggatgcagctgtaaagttctactaccttctaccccctaccccccgccacaccctcccatcctctaactcccacccctgcttgtatcaaagctacagtggcctctgtatgtctgggtaggtgaatatgagaaaatattttcaatgtccagtttaatttgatcagggaactcctttgacaacattctcagtccaggtgctctcctctcaaatgcattagcatttccacaaactggaaccaaaaggtgggtagggcctcgctcttggagcacctttcctgttgactcagagcagaacaccaggcttctctttaaagtgcttgtccttttagctgcttttgccccttcttatgtgcaacttcacagacttctcaacaagtcaacacctcttgctgcatttgttgttttctcccacgtcagaatttgattaagagcagtgagcagtaaccatgacatggcctgaatgctatcctgtcttgaaatttcctctgcccagtgaattactacattacttttgaattcagcctcaagttcacagaatattagcagagagaagccaggttctttttttttttaattaaaaaaaatttagtgtgtgtgtgtgtgtgtgtgtgtgtgtgtgtgtgtgtgtgtaagtgtctgtggggccagaggacaactttatggagttggttgttttcttccacctttacatgggttctggtgatcgaactcacaccaccagactctcagcaagcactttaccttctgagccatcttgatagctcccagagccagattccttgacagaaatatactacaaatggccttctagcccagttcccaatcaagtccttggtcttcttcattatcatatgagttaggctttccctgtctgcatttctctctgcatccttgtcttccagactcccactaggatggtccatttagctctgcttacagaattccagggctcccctagcttacagttccaaactcttccacattccttctgtaaacccattctaaaggcctacaagccacaccatcaggcttatcacagcaaaacccttcacaccaattttctgtgttgcatcctgttctggctgctgtgaccaaatccctgccaaggacagacttaagggagaaaggctttgttttggcttgtagtttaggaagaatgccggccatcctcatagggatggcaccacataggcacaggaggttgctggtcatgtcaagtccctaagaagcacagagaagacagaaagaggagctagactcccctcgcaggacccaaggtctccagagaggattcaacgcctgctgtttgcacagccttccaaacagcgccaccagctgggcaccaagtgctcaagcgcacgagctctagggtagaagttacacttctatccacaacagtggtcttaaccacacattgggatgatggtagaggaaaggcaaaatgtgttgggttccaaatctttaacacagagaagcaacagactcattgtgcttggagcaaaacatttgcatcttaagagcaactttggacagggaaagaagcatatcagatttatcaaagttacttttgcatggagttattcaggtcacagcaaaaactatacattccacaaaaacgcaagaagcgggggttctggggacgggatgtggtcccagtggttatgctgtggcagcaggggcaatgaacacattccaggagacagaatgggaggggtcatggctggaacaaagaagcgaatgaacactgagaaatatgatggcttcagccttggggcctggatttaagaaggaagaattcattcagattacatggaactgaggaatatttttaagaactcaaaaagaaaggaagaaagggaaaaaagaaaaaaagtactcaaatgagagctttcttgggaaagtggtatttatttatttatccctctcccatgtctttgaggttccataaagcactccaggctgcttaaataagtatccggaattggacaaaactaatgctaaaatattttgacaaagaagcagaaccacatgtatgtggaaccatggcacttaggcaaaagcagtgtgatgtgaagctaacacctaaaacccacaacagatgggcctgtagacatgccagggatggtttcagatttggcactgaactggacagcaggcaatacacaaaaggagatgtcctcacacacaggatctgtgttatggagaggaagaaccacacaccaacttgcagatcctaaaaagcagtgcatgtttccatccggaagccagagagatttgtttccatgctctgtaaggagggcagtgtgtgatggaacactgacccagagaactcatttctgcaggattcattccaaagccgtgtcaagaagcagaatgttaatttgttctgatggagtttaggttccttgatttccacggaacaaccagattccagcttcagatcaccccaggacatgttccctggtgtccctagctcagcagccttcagaaatgtgggctctgccactgggtcaggaatcacaagggccagcgattctgggtcattatagctctagctaataagaacaggaagggagggttctttttccagattccaggagagccactgtctctgggctcctgaagagtgggtgagagataaagagtctttccccatctccttctgaagtagtttcagctgccattaaacttttatcaactataaaccaagcatagtgaaagcaaacctgctctgtgggcacaggtgtcactgcttagtgacagacacgtgcaaaaggggtctaccctgagagatgagcttcagatgcacacttggagtgtatgggggggggggacagacagacagacagacagaagacagagatgacacacagagaatctgtggcattctggtttactcttggtttgaggccaatacagttcatcaagctattttgaagcctggtataaataacccctgagcacatccaattatacttgatttcgtattcaccaagcaacccctacttattaattcaatttccaaaagcccgagaaagggaagtgtggtagatgtatgccaagacagctgtaattattccctccctgtagctgggcctcatgcagcgtgactttgcaattcatctcttcaatgcattacagcccaattccacacatctccctaggctggtctagtgttctagtgtggtcagtggagcctgcttggagggccagtgtgccagtattgcgtctaggtctgaagaggtcctgcacgtgcctgccccagtcactgaaacagatacaaccactataggatgaacgtgggccaacttgtaatgatgagaaagaaggcctatttgctctgtttgttggcagggtgacagaaatgaagccatgtgatttttccacatactcctgcatttccagtttacctgtgaggagaaggacctagaagagacttaattccaagattccaacacaaagaaaggcatactgttggaagagagggaaacactaattactccaacttgatcattccacctgtgttagttcgtttgctctgtcaactggataagccaagagtcacccagggaagaggtcacaactgagaaattgtgtaaagcaggttggctcgtggacgtgcctgtagtggattttcttgttaattgatgtagaaagatgcaacccaccctgggtgataccatttcctaggcagggtatgcctgagagtttaagagtaaagaaagctaggtgagagcaagcaagcaggtaggcagctgtgtgtagttgtttgttgatatgactgtatggtggctagttgcttaagttcctgcctcaacttctctcagtgatgggcagtgatctgtgaatttcctcccttgtgtcgctttggtcaggatgcttatcaaagcaacagaaatggaagtagaacaaggccgtgtgtgtgtgtgtgtgtgtgtgtgtgtgtgtgtgtgtgtgtgtgtatcaaatatatcattagcatttttaaacgaatctattaaattcttagaatttaggtcacttcccccgctccctgctagctcaagcaatgatggcagagggttgtttctgttgagtgtctctaattccccaaaatctccctgcacctgctgctgtagcagccacaacagctcctcgcagagctgaatgttcctctctgctgggctgtagctcatcacctctcctccgggaaatgacaaggagttgtgcacagagtacctgtcaagagagaagctgggcaacaccaacttttaattggattctgtagtggtttccgtgggcagatctgaccccctggcattttcattttcctgagtcttgttgtcagttttattgtggagagtttggtagggcctggcctctctctcctgtgagtccctggtttctacccagctgctgccgcacctcattattgctactgttgctggacaggcagaccttttgatagctggaggcccgtgggactcactaatgatacccagggaggttcaacaggtgggatggatgctgcctaggagataccgtggtgaaaatgtgcctgcttgtgtccagcaaggcaggaatgatttctttcctttaaaatggctgaaggagccaggctggcattcttaggttctctacacaacacaatgaagggttaatgaggggttagggttcagcttagaaaatgcctaggaacttgggggatattttgtgaaattaaaattttgttcatgctcattctcctgttaagaaattaaagagttaggccattattgtggggtgattcctgggatggggatgtagagcctggatttgaggctcacttgggggatatcctggctctgcggtgctagctgtatgccttccagcaagatacatgcacagctttgctgagactctgtggagtgagaatggtattaaatttgtcatgaggattaagtaatttaagtgtgtataattcctagcatggagcttagagcagatacacacttgataaatgtgagcttaatttctccctctttatcaacattttttacttgattttattgctattttttgtttgcttgttttctggcttgccccccacccccgtacttctgtaaaatggtggatgggtttttgaaagaaagatgacatctatatggcaatctttaagatatcatatgactgtatactaaaagtatgatccaaattttaaaattttacaaagctatagtcatagcaagactgactgttgcttcaagaaatgatctttctgatcatttatttgcctcatttttttaaaaaagcatcttctttgccttttaaatgataccaccttcaattcttttattaaagcttctgtagcgacagtatattctcattaatatcctaagtcattaaaaaaatagatcagttttaattcccctctgggcacacaatgaatcctgtcttctacaaagattgtcaagtaaagcttatttctttacccaggcaacaatttttctaagagtagcctcactctgtctgtaacccatcttcactgttcatgaatctgttgaggtatttcatggtaatagctattccagtcataatgttggcaatgagatggtcaaagttagtacactgtgaacactatcacagaagcttttgaagcagaggggcaggaactcattttgaggtagtcagctgcccatctaggggggtggggtgtcctccagggtactctgtcacaagagcactgtgcagaaacattttaagatcgtgttttctgagtaggaagctaatgcccaagattgtgctgccttgcttatagaccaagaatgtcaaaggctgcttgacttaacatccatgatcttccttctgtccccagtggcctcaaaggcagaggtccttgcctttggctatgcaccaaaatcatttggaaagctatacactgctggaaaagagaaaagctagagatgcaccactatcagctttcaaaagctgctgtaagagttcactgttgagatgtattacatccttaaaagagtagggtcaaaggtcagcagaacagagagagcaggactggagtttgaaaatgcattataacaggtcattgtgagaccagggtgagaactccattggttaaaatggagtgtgagtccccagggcctgttatgacaaatctttctgccaaaagctgcctgagccccacggccacatgtgagctttactccagttgcccgcccgagttaggccaaatgaatacacagaaacttgtattaggttcacagctgcttggccaatgactaggattctcatctgttagctcagtcttaattatcataaatctatatattttataagacttatcttatcggatgccttattggcgtccctccttgccggtggatcacattgtgctgccggagcaggagcagaggggaaaaaagggacccttcctgtttctccttcgcttaaatatgagtctccttgctatgtcacttcctgcctggatcaccacttctctactacatttcccagaatcctctttgactcctagtactgtctaacttgttgtcttattggccaaacagtattttatttaacaatcaacaagataaacatacacggtacattccccatcaaggacccatgtaaaaaagccaggggttggtgtgttacttgtattgccagcactagggaagcagagacaggcaggtccctggagttcactgactggaaaacctaccatactctgtgaacacaggtcaccgagacactcaatctcaaagataaaacaaacggaaaagcaaggtggatggcatatggcatatgaggaaagatacacacacacacacacacacacacacacaccacagtcattgtgaaaaggctatgtgttatgtgttgtattattacattatatggtattctagaaaaagaaagccagtcaggatggtacaaaggcctgtgatttcaggggctcaggaggcagtgaagatgatagaataaaaaatcatgggcagttgtttaatgatccaattccattttatataaagtaatatattaatatataacatgtatgtattatggtattctgtattatttattccttaattacataatattatgattttcaaggcctacagaaacgaaataatacaaggtcttatttatactaactaaatgaatcatggagggggttggaggaatcttgggatgaaatggaagtgtgataaatatttttagtttgcagacaagggcggggttgggggggtgacctaagtaactgtgtcccactgacatctgcaaggcaaaagctcaaagaaatacacagaagcaccatgctatagttggtaacatttctcacagtggatcacattagcaattttcatgcagctatacatgcatactggaattgagtatctatctatattcatggcagtgagaggagtcaggcatctgtcccatggttgtcatggatgttatggaggggtaaaggaaggagtcaggaatcacccccggggtaccaatttagagttgaggatttcaatgtaactgttgttcactggatatagacatgggttgttatgtatagaagcatttatagataacacagaaatatgtatgtatgtatgtgtgtcaaaaacagatatctgtttgcctcgtcagctgggatgctgtatattaacactgccctgagtgtaacaagcacacctattatgcaggtcttggtttccaatgttattttttaataaaaaggaacatgttttggataaatgactggttctaggactaaggtgggagatgccaacgatgagactggagtgaaaataaaatgtccataaacacagacacatgtacacatgcatggggatatgccaaaggaatgcaaagttagccaaattaactcccatttgaataacagaagaaatacatcactaatggattgaaagccaaggtataaaataaatacatatatgactatacaaaatggagtaagttattaaacacataatattctgggtctaagaattccatgtaatgagtgtagacactctgctctcaggaattagcataattccctgttgcttaagtataagttgaacaaagtattttccttccaaaaggactgtttggaaaaggagaggaactccttttctaaaggcattctttaagacacctttaagacactaaagacaccaggcatacacacctgtattacctgggtaattaggggcagagttggaggtgagaaaagacattgagcattctggtctggtagaatattcttccttgataacattggctgcttgaatgcaacaattctttaaactcaagggccatgaagtggcccttagacagtgctattacctgataaattaaagatcttacccagaagctcaaaacagtgtgcatagttgaatagacagtgaaggacaggttatgtgaaatgtgctacgggttggatctgtatgtgataggaatgcctttccctcctttgcatcttactctgtgtatcactggtgagaaacccctagctgtagaaggtttggccttaattatagagagaattattgtttgtggtttgatggtgaaaaagtgttaagtgtatggcctgttgcaaatggcactttcaggttcaggaaccagagaactgaagtcatcctatttgtctccggcaggggtggaggggagctggcggctggggctctaggaagcatgtcccatgccctgttctggagatggtgggcttcagcaagcatcaaggaagacagggcacctccctcgctgacagtatggaaatgaagagattctatttctacactcacatcccttgctgaaaatcttagaaggccaggagatcacttcaccaacatcaaggtacacaaaaagcttattttccctatcatttctcttcctcaaatcatcagtagtaggaattcttgtattttctaagactatttaaccttccagagagtgttttctgatcacatctttaacaatgctaagcattgaggagggatttttaaaaattaaaaagtaatcatggcctttattcatttgtccaacccacaatttaattgtgtctcatgtgccaggcatctggtaggtactagagatataataataataataataataataataataataataataataataataatataaaagcagacagagtgaggtgtggcttctttcttaagctggcagccatctaagagtttgctatctggcccagatattcccagtgtctggggaaacacttggtcatagatagtggctgggagatgatgcagcactattgtagtttgggtagaaatatctacccaaaacattcatgtgttgaaggcagagtcccctctgggtggatccaatcagtaagagttgactaagtcacaagggctctgatgtcatccatctcctagcagaggcttctgaagcaatgctgtgggttagttagctcatcattgttgttggttagcaaggcacagccatgttcagctatttgggaccatctctttactgacctggaatttggagagtgatttacacagtggatgctgggtcagaagattgaagatttttcaggaaactgtaacattgtaaaatctaagtagctaaaccctgtaaggcattgctgatctaagtgtgtgttattaaataattgttccattaaggcatgtcagcagggaattaagataggtgacccaaattctatacttctttttagtaactcagtgtaatgtagagctaacactcattggagctcagctgcaggcacgtgagatgaaggaagtggaggaggtgacgtgccctgggagcaagtgtgcaagtcacaccttgtaggtaggtggctagggcaggtatctaccttacaggcaggtggatagggcagctctctctgtctctctgtctctgtctctgtctctgtctctgtctgtctgtctgtctgtctgtctgtctctctctctctctctgtgtgtgtgtgtgtgttgtgtgtgtgtgtttgtgtttgtgtatgttcatttagttctctattattcgtttgtgagctgtgtttgttgctttctgcagtactatgaccaacatacaaagaacctaatgggaacaactgaaaggagacaagatttctgtcgctcatggttccaggaagttaggtccatgactgcttagcaccacatacttgggcagaacatcatcttaggcagagtgtgtgcccaagggttgggatcgcttcatgctgactagaaagcagagactgaaatcctcaaagtgtctgggaatgggatacccctaaagacttatctagtgacctactttctccagctagggcacatctcccaaagtgaaaggaacctcccacaatagtgccactacctggggcctgagtgttcaaaacacgagctgggaggagggcacacatttcatatccaaagcatagcatttgcaatgtatagaaaaatgtagtttaaaactgtggaatgggcagtgagtgggccttttgctattgtaagatggagtagatgaccttcaaaagaccccaccctctagaaattttgattcaatggagcctagaaaccctattctctttgtttcattcttcagaaaaaaaagttccactcatctatgcacccaaccttcccgagtcagttgggatcatcatccgttaagtttagaacagtaacttctggcaggttttttccaatagtgagcatctatctcatgtttgcaagctgcctattacagtctgttcttggagacctgaagcgataatattgtgtactgttgatcaaaggctgtatcacgtgcatgaaggctgcatcggccagctgaccaagtaccagtctgggttttcactcaagcagaaggacacctacttccacaggaaagtgagctgtgagtgttagggggctaaagcatcctctgaggagatctcctcagtatttgggtgcatatttaagtagagaacttagagtttgcatagagctttgcccatttttgtttgctactagaaggaggttactaaccattgataagcccaacaatccacgagagtgataatgaattccatccatcaatggagggaaaatttaacatctttcttctcacaccccccaccaccaccccgggaagagacatattcttatatttttggttgtaaacttagtctttaacagctgagccatctctccatccagcccaagacatattcttatggttttcttgtctttacaaatcatcttgagccagatgctacttggtggtcctctattacagttctatttgaaagtgtctgctacaggctcatgttcatagatgatgctgattagggagattgtggatcctgtggggtaaggggcatggctggtagaagagcctttgaaggttgtaatccagctttgctcccagccagaggtctctgtttcctttctactgtggagatgtgtatgacctgccacagtaaggtcctgcaattgcagactgagctgctctagccatcacgtgtttcccaccacaaggagctggacctgctaagctgtgagccaagagaactctttcttcgaataaactgtttctgttgatccactggttcaccaggcttaatcaggatgaaatcttttctttggtatgtcagtgtcctttctggggtgaatagatgtttgtttacaatctcaccaagaaataccatgtaacagtcccacattcgcatctcaccatatcccagcatattcctgctgtggggatgctggatttaaggtaggctaggtggatttctactgtgactataaacccttgcaagggtccttggggacccttgaattttatggtcatcatctactcagaactaactgagtctgtgactctgcatattttggtgttattaaaacaggttagctttcttttttttctttttctttctttttgtttgttttgttttggtttttggtttttggtttttcaagacaggttttccctgtgtagctttgtagaccagagcaggctggccgcgaactcatagagatctccttgcctcagcctcccaagttctgggattaaaagtctgcaccaccattgcctggccaggttagctttcttatcactagtgggatggttggtcagttgcagacaatgtgggaggtgacttttctatatgccgttttctcctgctaagatcaagtctgaaacctgctcatgtttctttctacattccttcaaaggaaccttatttacctgttggatccatagtcaccctgaccatgactttcttagattattattgtaactgtataatttgtatgcctaaacctctggctctgagttgccagggttgggacatttccagagtgtctgaggtcctttgaggtgggggagtacccttgatacagtgggagatagcaggctatggaaaagtcccagattcaggggcctagtaggcaatgacacactgtctgctcacacttcaacacataccttcccccccctgtgattccagtttgtgaaaatcccaggcagttactacataagtacaaacaatccccaccacatggtcagcatggtctagccctcttacagagacaacataggatcccaatgccactgtagttctacccccacacccatttaatgcagggacttttgcattttatttccaaagtgtgttatattcctgactgggccgtgtttgttttcatttttcttttctcccttcaagttgttttagaaaagcctaactacattcagttttcctcatccctgattttagattttcctgatgaaaacccagtttaccctgtgatatgtaatactgatcactcgagtatgagacccatagtcttggaaaccatctggagtataaattcctttgggtggcacaatatacgtttgctaccccaccacccatgaacatatccagccattcttccctgcttcattaaaaggcatcagagccagttgggttatgatggaaagaagaaataaagggtagataggaaaatcaataggtcagcttcgatctttgaaagatcttcatatttctcccatcagtctacctgcactcaacctttcagggatgtgaagtgtcctcagattctggaaaccatcagggtttgtcttctttggatttccaaactggggaggggggcttcagaatattagagtttagacttaattttttcattaaaaattgattattatgagagaaataaataattccagagtagcctactaatgactatcttattcattcattcataagaaaatattttctgtcccttgtgtgccaggcattgtggcacaatgtgttgctgtgatatgattttaaaaacacatttgtcttggttcccatttctattacagagataccaaaagttgtgaagttttctgagtgtgagtaatgtttgtgtatgttaatgaggcaacctaagtaggggcagaaacagatcccttgaaagtagaagctggtcactagaggattaacattctgagctctgaatgtcccctttgcttttaggaggtggtcctggggcaggaaatggagttaagtcctcaatggctaatgatttagtaagtcatgcctacaaaatgaaactcctataataactctagggctaagtgagcttcctgattagtggacacagtcatcaattctgagagagtgacatgcccagtgagtacatggaagtccaatggcccccatccttcacttggttccacgaagtgatttcattggctattcctgggttgtatcacttacaataaaatagcaacagaaagtaggcagctttcctgagttctgggagtcattctagcaaatgactgaacctgtgtgtatgaggttggtagtggtggtggtacctaaatctgtggtgggttagactgaagtataggtgtcccaggaaatatctttgtaactagtgtctaaagtagtgacatcttctgtctctatgcctttacttatgaggtctgcgctgatgagtatccgaagggattgcattgttggccacttagttgtttttatagtgaattgaagaactggttggcatatgaatgatgtatctggggataaaatggtgaacagaaataggaagttcctattcttaaaatctgaagctatgcaacaagttttattagggttctttatcacgacatcttgtgccatccatttagccacgaactctaccccatctagtatcaggaactaaccctgtaatcacatcagtgtgcttcatgatttctatgcctgtctggctcagttcactggtggtccagtatccagcaggagattgatgggaaggaggcgagcaaaagcaaagtggtaatcaacatggtcttgtttcctccttgtgaggccatcattggccatatctcctttctcagtgcctttctcctttcactgtctggtaactccttctggtcttcagggacctgggagtggtaaaaatgcttcaacttctgtcaactcttgtggttctattaaaactatatacacacttgtaaaaaatatgaataaaagaagcctccttagtcaatatgccttctttgaattcccctcataggagtgtcctatctctttggggtgcaaaaccagaactgttcttgtgaatgttagatttatgtttgccagctcttcggcttcttgtgaaggtcatctgggctgccatgcaccagctctgctttacagcatttagaattgcccttttccattgccaaaatggacctctcattcattgtgattttggcatcagttctatgttctggctttgaagatgcgttaatgctctgggtttatagcaaaatgagacatgctgatgagagtttgataagtgatgcaaaagttattgctgtaatcattttattgttgagatggaacagaacagaaacactgaaaagtttaatagtaatagaccgtgaaaggaagagtagacgtgtacttttcacgtaacttggagaaccatatcctaacattgatgtttgttattgggcccactgtctgaagccccatcctagcacttgtattggaatctattgttagtttttgccaatgaatttactgtgaaaagatatgaacttgtatatttctttctttccatgtgagttactctgagcctcctttgctttctaagccattactgaagaatgcattaggatggccaagaaggacagtaaaaactggtttaaacccaacctatctctggtccattgtcatgaagataaaagaaaaggctgtgtaggaagatctctgcagagctagcgagaggctgtcccactccctgacctgaagaaatgaagacttccaaaggccattcatcccaatgctacagataaggagatgaaagcaatgggattttaaaaggtgtacctagacacacagtgtggtggttttcattatccataagtcaattttggtcatggtcttttgtcacagcaatagagaggaactaatttaaaagttggtaccagagagtagactgtctatattaggaacctgacaaatcttcttcttcttcttcttcttcttcttcttcttcttcttcttcttcttcttcttcttcttcttcttcttcttcttcttcctcctcctcctcctcctcctcctcctcctcctcctcctcctcctcctcctctctctccctctcctccttccccttcctcttccttctcctattcctcttcttcctttttatgtggaagtcttcagaactttggacaacaaatgttccgtatgcatcacttaatgagccattctagtagaagcctgtgagacagaagtgctgagaataatgtggactgtggaagtttaagaggtttcagagggaaacaacatatctgttaggaactgggctagaggccattcttatgatttttggcagagtctgtctgcctgtgtcctaagaacttgcctaggactaaagagaaatgagtggactcctccttttagtggagaatttcaaaacaggataacactgagtgtgtcacatggtggttactggcaactcttatacatgtccacagtgaaaaagggggaatgtgaaaaagaaatccaaaatgttgtacagtttggggagaaaaaggaatgctaggaagcttaattaacagtgaaagattgtgctaaatgagagaatgtaattattaaggaacttaatgacattaaagagagactttagctctacactggtacaatgggaagaatgccctcaggctgagaccccactatctgctaggaatccagcctgtgaaaggagaaagaattaaggattcttgttcctagaaagcaatagcgtcaataagcaaatgctgttgaaaatgtggttgaagggggccagggtccaccccaaactgctagctaaacctggcagtatcatccatgaggtactggctttggaaacataatggggggggcatggattcttcctccatgtttttaaaatgctgctgaagtcaggcaatgtggcagtgctgaagtggcttcagggtaatgacctgaggtagccatgagtttatgagaagtcattgaatgaagctatgaaagtgagttacaggaaagacctcaatatcagagctgtgagaattctgctgagaacttgatatagagagtggaatgagtgtgtgtgtgtgtgtgtgtgtgtgtgtgtgtgtgtgtgtgttgggggagtatatgttatagacagcaaaactggacaggtaaaaccatataagccttttgaaaacaaagccctaggtatcagccacagagctagggaattttgttattgtcttattggatttcagccttgctttgattcagaatcttatcaccacactcccattcctccttttcagattggtagcatatattctgtaccattgtgtgctagaagcatgtaagtcactttaaaaacaaaaaaacaagggagtaacagttaaaagactgccttctgatggggaatgtactgtgtatgttcatcttattgattattgaataaagtacttgtttggccaatgagacagcaagttagacaagactaggagtcaaagaggattctgggaagtgtagtagggaagtggtgatccaggcaggaagtgacatagcaaggagactcatatttgagcaaggagaaacaggaagtgtcccttttccccaccgctcttcctccagcagtgccatgtgagccaccggcaaaagagggtgccagcgaaaggcatcctctaagatatcttataaaatatacaggtttatgataattaagactgagctaacagatgaggaatcctaatcattggccaagcagcatatgaacctaatacaagtctctctgtgcattaatttgggccctaattcaggtgggtggctggcatagagcgcacacatggctgtggggcttgggcagcttttggcggaaagatttatcgtaacagccttcagtctcaaaagagactgtggacttcagacagcattgagactgtagatgtttatagggacttttgaaattggaataactgaattttgtattatgataaggccaaggacctaggaggaccaaagagaggtatgtggtgctttgagcaagaaatgtccccagtagacacaagtatttgcactcttggtccctggtttgtggtactgttctggaaggttatggaacctttgggaagtggaggcttgtagggagaaaccttgatgataggtgtcaatgaccatgcccacttgggtgtggccacaattatgtaacaagggtttaagaaggagggaggcgagcatgtggttctcttgcttggctgagctgactgggaagcatttctgggtccatcccgcttaggtgcaaacatggtcactggtttccttgcgtgagtatttttcccctaataaactacccgttatcaacctgtctctgactctactttgtaatcatcaatagaagcttgatggaggaagtacattcctggggtgtgttttgagaattcatagccttgttccacttctttttctatttgtctccatctctctgtctctatatttctctgtctgttctctctctctctctctctctctctctctctctctctctctctctctctctctctctctctctctctcattacttcatgtttgcagttgaagatatgatttctcagcttgttgctctggcagacaattgcagccatggctcttttgccattatggactcacctctggaacgatagccaaaataaactctgtctttcctaaattgattttagtcatggtgtgttatcccagcaacaaaagtaacttagaagtaattgataggtacagcaatgttggtttgccaggactaacttgaggacgttctgcaaatcaacctgtttaaagagtaatttactgtcttgtaattctggaggacagcagtccaaaatcaaagctttggcagacttgttcctcccaaaagctgtgtgagagattcttttaggtctctctcagcttcttgacaactgtcttgggcccatgtctgcccacaaaatctttcctttgtgttgtgtccaaattcctcctactttgaggacactagtgataccaggttagagacaaacataattttaagtggattgcctctgtaaagatcctctatcggggaccaggacttcaacagcagattctagggaagatggagaaggactaattcatcccctaccatcatctgtctaaagactgagagcaactcagtctttcaacacccttgttagcttttatttcctgtcatacttgtttcaatattctcatttcccatttttttcaccctgggatagcatcgaaaagtgcagttagaactaagaatttttgcagacacttcaaagattcaatttaggggaaaataaagccaaagcaaatcccaggcagcaaggactgttattaatatagcccataaatactcattttggggataaacatgaactttttattgctccatggtggctagatgctattgaaatttgtaggtataattttctaagaattatttcataaattctgataacaaacacatgtgtctgtttttccccctttgagtttctttactcctaggaggaaagatctcccatgaaagcaagattttttttcctcccactgttccctggatgcagctttggcaggaccatggccaatataggcactaaattcacctaaaatggttttgtcaatgaaggatcttaaaccatcttgttaggaggcagctgtgtcagggcagcactctgtatgtagcaggaaggatagttttcttatgttggaccaaatgatctcttgggggatgtggatctaaacaggacaaatatgtcttttgactataagccaggttgctaaggtcagtatagcttgagcagcctcacatcaaccaaaggtgctttgatttgttgcaacagaaaaccaatatcagagtgttgaactccactccagtgacaccattcctcttcttatgtggtttaagatacttgctgaaagtgggtagatgatgacaagaaaacagcatgttccttctgagtccacagtcaaagtcttgacctgtgtggcttccttgggcacagcagcaatgctgcacagctgaggaccctccacactcaggggaagcttttgaaactaactcatagcacagaacatgtttcttgtggaatatggaagtgtacagaaggaaattgcatcttcagttgaaccttctgcagagttaatcagctattagaacaccaatgattgtggaggggttggagtgttgcaagtctagggcctaattacaaatcattttgggccatcattagctttgtgtgtgtgtgtggggggggttgagacagggtttttctgtagctttggagcctgtcctggaactcactctgtagaccaggctggccttgaactcagagatccacctgcctctgactcccaagtgctgggatctaaggcatgtaccaccaccacatccatcattagttttcttaagagtcatttcctgcctctgtactggacctaacagctttgtgaccattgggaaagtcaattggattttatagacagaacacaggttttcaaccaactgaaaacctgtcagatatggcatgaggctgcaacgtttttttccatttttaccttaattcattggcttgatgtttctatggatgtacttgtaaagtgttcttatttatgactttctttgttccattaccataaaacaccatcaaactgtcacaacattggagcatgaactttcaagtaactcaactttatgtttctgggccatggtcacacatatttggcctcagaataaactacctcttatctccagtttataggaccatcttctgagccaaatggctaccatctttctcaagtccagctgggcctattagccaaaggtcatcacagctgggctcgttgactcttgtaccttccctcttggaaagagggtagaagtgtcatgggacccctaactgatatccagctctcccacccgcatcacagccagtcatctgcacataaagactagagtgtacaggttggggaaaatggaggaagggaacaccagatatatagccatgggggagttgtcatccatactgggtacagaccttccaatgtggctgttcataacccctcacccttgctctgtaagtaaagctaataaactcattggctccccagggtgaaccttggtggaactgaacctcagtttatcactgaaaccataggaggggttggatgtgtttacaagggaaggaattttagcagtatctcctttgaagtgagtgttgtgttttgcatcaatatttggtacctggctgaggtagtagtgggtgttaggctgtgaccccaaacactacgagcagtgcttctcaagggaattattgagactttcccagtccatgctctagactggaaagtttgaattcccctaggaaattagacttccactatataccaaggaaaagaatgtcagtgagtaaacaggtttggaaaatgccatatatggcacccttctctgatacctttgtgcctattagaatgtaggatgcttttacatgtttaaaaaaaaagaggtttcaatttaagcagatgtgtccaagagtttcttgatcaaataccatttgttcatacaaaacctgcaagcaacacattttgagaaattctgattaaaatctgcataagcctaagacccagatgtgaactgaaataggctgtgtgtcaagttcatgggcaacacaacaggagcttgacagaaaaggaaaatcctaatagtgtgacacagaatgttgcaatggcttttcacaggggcgtggagggcaccctgagctggacccacaggctttgcacccttggggggtctcttctaattgtgggagggggtggcattatgagtcagtgtgaacttggcctcaataagcagttaacccagggccagcagtcagaaggcagagaatgtcttggcctttgtcacctagctcttgttctgcttcattgatgagtgtcgcaccctccccagccccaacctctaccatccccagtctttggtgtctacaaggcctgtctctctgtgcgagctcagctgtctgaaggtgaagaggagggtgttgttgagttgatgacataatgtctacactggctatgtcactccggagaagcagcatttggtccagcaagatgtatagctgccaagggaggcaggatgaccacccgacagagctagcaggtagatgctcctgctacaaataccttttggctttaaactgtacaggctccattgaactagcttaagacaggaagatactgaagcaaaagacagaatgtaaagaactgaaactctctcaaggttggaaaacatgacagcataaggggtttttaagactcaatcgctgtgtgccttgactgtaatttttgagaaaggggttttctaagcccagtttgggatggaatgcctactgttgtctattcagttgtagcatatccaataggtagcattcttatcttccctatgaataccctgatttattcagaaggctggcaacagctcaatcttaggggaaagagaccatctttatggttgtttatactcactcagtggttggccctgtgatccagttctaactggaatctggctggatataactctggatcactttcatttccttatgtaaagggacagatacctggtatggctctttctacccttgctttctttttcttcttggggatgcagctacatgtctggcagagcagcagctatctgtgatcttgagacatgggatataagctgtgtactggtaccagcaagagaaggcacaaaggaagtgcttcatggtcaccctgccaccatgacactggactaggaaatttttggttatttcttatttgagaaaaatgacaacctctctgctgaaatcacatcttgattattgttattacttagaaacccaaagcatccctaagtggaagagttatgtagtgaaaacatgggtgccaggagacaacaactatgactcagagagtgattcagtctctattaggagagagcagtgtgggctcatgaaaaaaaaattgagatgtcccaaagtgggtgctgaggtttccagcagccttgaaccttccctgctgctatggagtacagagaaactctttatgaccccccccactgatgttctagctggaattcataaattaattaaactgagttttgttcatccttccttacctactaggagttttttagtgctcatggcagagggttgaagatgctgactctctttaagctgtcattccaaaagagatgaaacagtaaacatgaaatgaataggcttattctcggtggtgagcgaccaggttacataatgtaaactagagggtcgtgctggtaagttaagggaggctgcagacaccaagatccaagaaagtggtatttgaaatgagatttgagtagcaggaaaaacaaagcaattgagaaagccgggaggactgggtcactcggtatgtcaggaaagcaggaccagtgcagatgcaataagaccagggtggacttcccctgctggaaatggacaggtggctgttgagtgggcatatgctgtaggggctttgggatgctcgctgtactgccatctctgccccttattcctcacaaagttcaggttgctgactgaactctgtgtaatacagtgtggattgcgaatttcctatcatctgctgtagctctcagagcctggataaggggattgcctgggtccaggtgggtgggtagtgccctcccagactaattgccttctgcccattcaagctgttgggaatggattcatcactcccagccacagctccccaggggactagcttttcccttgcacaggcagggctggattcccttggagtagggtcactcttgtgccagagggactggcagaggattcagctggcacacagctgcttccaggtcatgcttcagccaccccatcaagggcctactgtcacgtcacacatgtctcctgctggtggctacccatgaagagacctttgcagaaatgaaaccaaacaaaacaaaacaggtaggcagtgagggccccgggctatggcatgcagcctggggtggcttacagcctgccacagatgctcatgtctgccctagtgtcattttcaagtgatacttatcagagaagtagtcacatgagatcacaggaccacagtctccctcagaggtcatcccgtcttacacacctcatttgtctgtcattacccagagcaaagtgttggcatgccaccatccctgtttctaacagggtgcctgccaagcaggatcactaccacttcttttttctctgatgctaacttgctggcagttggagccatggtttccctaggcagttagttacctttccagtgtgacttgggacttgagacgtgtaatcatccaccttagaaggataaagttgccaagaagtgcccaagttacctcttcagataccttggatccatagctcctagatctgggtgtagtgagaaatccatgtgcatctgtttaaggggtattgaggatttattaagatataaaaggggggacatacactcacaaatacaggatatggtaaatccagttgcagagtctttggaaagctgtggaccagtcacaccctgcttcatgccacctgacctggtcctcaccacccatgagagcacaagcccctccccctttccttttaagaggtcacttcagcagacacaggcaagaagccccacctctatcaggtcagatagcccaaggtcatcatgggtagagcgaatacctgctacacctaggatacaaagatacaaaatgcaaaaattggagagaccttgggagattcgagatgcaatataaaatatggatgcccaccagtccatgatggatggtcatactacaaaggaaggttcttctgggcctgtgcagtgcttacacagatgagtgggtcactgtggtgtgatgacctcttcatgttatgggacagacaaaaccagatgctcatgtgtccaccatagggtagttaccacacctctgcatctcacttacaccttcctgtgtgcttggtattcttttcatagacaaggaaaatgagaccagagtaattaaatatatttagctggcagtagcaacacaggtagcagttgaagacttctgagatttacctcatatcatttctaagtccgtctgtattctcatcctctgagggggcatgtgtagtgggttgatgggatagcagaaattaatcatgatttaggtaggggtaaattcctatgggtgctgtgaggtccctacagtacttgtgaggtaggtattctggggaaatagaattccaaacacaggctattgacttttggtgacaccccttcattatcagtgatgtgtggaagcgtcccactaggaagtctgcgaactgaagcagggtccatgagtctcctaccagaacattccacagcatcttctcagcagctcttcacgttcaaaacatttttattatatggttgtgtgtaaatatatatgtagtgaacatgtgtgtgtatgtgtgttctcatgtatgcatttgcacatgtgtgtggaggccagaggctgatatcatgtctcctcctccatctctccatactaaggcaaggtctcttactaaacttggagcttgatgatttagtggatctagccaggcagcttgcctggcgggggatcctctgtctcccctgctctaatgctggggttgcagaagggctgccatgcccctcagcttttatgtgggtcctgtggatctgaacccctgtgcagtcttcacgattgcacagcaaatgttttatccaaggagccttctcccagcccttaccttctgttcttttaagcatcactgtgaaactcagcacccgtggaacctccaaggccagactttaagaaccacacatctgtgttagtcttgtttctgacattgaagctgagctatgtggctgaacctgcctgtgtctcggtagttcatgtacctcacaaagcagtgagagacccttcctgagaaggtcgtgaagactgtgtgtgtgtgtgtgtgtgtgtgtgtgtgtgtgtgtgtgtgtgtgtgtgtaactcagaagttctagtgcttgataaaattaagcttctgggcaggagtgtggactcagatctgagagctctgcagaactccagaaggactatattcacaggtcatggcaagggcaggcattctagggcaggaaatattccaaagatacaattgaggacacgttctcttaaccctgtggactaatcagttctggaccctgaacccccagggttatcttcattttctgctttaccactgcaacagcagacagctcagcttgcccacttgaaaagcaaaagctgacctgcgggttagcctaagcatttgatctgaaaagagaagcaaaagtcaggcactcttatgtaacttggagggcataaggagccaacactaaaaccactgcccctggcttctccgaagtatcataaattttcctggactggtttccagtcatggccaaggtgtctgccatctgttgttttgggcttaagatagactagaaaaaaaaagctaatttgtgattaaaggctataacatgctagtatttgaaattactcctgttctataaaacaatctgaggtggctttccagtttctcggcaatattctgacttaaattgattgcttcctttgagtttcttggcttccccacacaaagctgtttcttcctccctcattctcttgccctccctttcatatcagattttttttttcatattgagatcatctctccactgaccttgcagcagcttaacattttgttgtaggagtcaagcaaagttgaaacacagagccaaatgagaaactgtgaaatagtagctcagcctccacagggcaaatgcgctctgggttatttctggccagagcagatgtggccttgatggactgtggggaatagtatctcccaggtaaaaataagttgctaagattaggacacaaatgatgcaaatccttcactcttcaagttgatctcaccgagaactatggagaaagaagactgactttgactcgtggtagatcctaccccggccatcaacaaatggacgtcaggccacaacgtgtgccttaagaaaatgctttaaggctacaccagcaaccaaagtgaatacaataacaaaactctgtgtgttgtcatctaatttggcacagtatgagagagtgacaggctggcaccagaggcattgaagtctcctgaatcccagttctcctgttcccaccccaaaggcaagctctacgttcagcttgcatactttcctgggtacacatgtagtttagtgagatgaaatattgctgccatcttactgaataatccttcatgaaagcacacagtacatgttattctacaacttgttttaaaatttcacactagatttttagcaatttagtttttggttcattcattgaaaccatttgtggaatactatttcctgaacaaaccacatctaggttgcaactccttttcctctgtcacaaacaatgtttcagtatgtttttacaaaagcctctttaagatgacaggtgtcagagtgttttctctatactcacaggaaaaggtacactttacatagaaaatctgcacacagatatgcagtatcttcgtatgtatatgcatgcaagtgcagagaggacggaaatttcccagaataaactcattttcattcaattataatccagtttaggataatatagtctaccccctcccccaaactccaaaacttctaagtacaatgtagtaagacaaccccactacccagtaaattacatccctgagagatcttggacatatatgcagacacacgaatttgctctgcctttgggagtccacatggtgtgcaaacttatgctcctgtccttgtgagtgtattagagcaagtaaatgatattgtatgtatttaggagcattctatgtactattggaatgcagctttcccccattcagtgtgcctgccactgaaacggaagtcccattttaagctttctgggtcacagtttcttattggtaccaagacaagcatgtatgtgtgcacgcacgtgtgtgtgtgtgtgtgtgtgtgtgtgtgtgtgtgtgtgtgtgtgtgcgcacacttgcactcatgtgtacacacacacacacacacacatacacacacacacacgagagagagagagagagagagagagagagagagagagagagagagagagagagcaacaaagactcaactgttttgcagaaacatttctctggagctccaagaccctgctgacagctgtagctttggctccagtgtgtgcacatctgggaagggcagagacagggagcgagtaaatgatgttctgggcccttcacctctgtccttacccaaggaatcccactttaatatttgaccattatctttcctttggatttaattggcaaaaatggatacattctgaaaataattcttaaactatggatttagatagcttcaaagtttttttttttaatcaagatttaaacttgaatgaaaatagcttgtctctgggacttttagaattgtattcagaattgaagaacaagcttgcttaggacacagcatttcctgcgtcaggtttaggcaaagcatgttggctcctccacctgacaggtaacctgttcttcctgagactgcacaagatgacttgtgtaggacactttcagaggggcagagcaataaggtcaccaccatcttgggctacaactgacatcttttctatggccattttggctttatctgcaagagtctttcaaaacttaatccatttgcattgtgcttgtttattctgtgaataaggggctaagatgtaaattttcctgaaacccatttcctcccagcaaactgtttcacatgctcacgatgaagcatattttctcagcagggtgccgagacagttaactattatattcaactattctattcacagagatgaaaattttattattattttaatgaaaatattcagctcctcatgggtttattttgcattctcaaatatagtaagaacatttaaaaaatgtcctaggtagtaacttggtagtgaagtgaattagagatgggcatgtgttaattaatttgcacagaattcataactctctctcccattaccctggctttcttcacctccctggggcctggattacagcttcctcttggagtctggtgcctccctctgattggcccagcttgtatttcatcttcctccatcactgttttcattgtgtcgctcccatgttccaaaaccctcaagggatcttcattttccaccacatcaaacctaatgcgcagctgcctattttcacggctcctcctaatctgttttttccttacatctccagctttatttcttttgccagatgtgattttggttcctgtggtttggagatagtggaatttttgtacacatacacacacacacacacacaagttgaaagctgcatcatttttcttaagtgtaattcatccttgctcccatcaacaaaagcatatccagacactgcacacactgtatcaggccatgggagcgaggctatgtggtggtcatctgggggtggagtagaggcaaacctttcatacacaccaccctttctcagtgtgcaaggtggacacctggcacaaagaagatggttttttgggagcagtttgtaaagctctgcccattttgctacatctggcagaattcaagctaacattcaagtaggaaaatagtaaatataaaatcagcagaggctgactccaaagtctataaagagacactcctacatgagacaaggctgaaagggctacaaaacactagagaagatgcctgaggagttggtgaatgagaatcaggtgaaggcaatgtgttggaggaggcatttcatatccatcttaggcttccttatgtgttaaacaccatgggcaaaagtagctggggagaaaggggcttattttaccttgctggctacaactcatcatcaaggagagtcagggaaggaactcaaggcctgaaactgaaagcagaaactgaagcagaagccatggaagaacactgcttactgacttgctcctcccagctttgagaacttgcttttttatacaacccaggaccacctgcccaaggatgctaccatccacagtgatctggactctcccacatcaatcaccaactaaggaaatatgctgcagacatgccttcaggccaatcttttggaagcatcttcccaattaagatttgctcttcccagatatgtataggtttgtgtcaagttgacaaaaaactaaacagcatagcatctttgaatctaatttattttcaaattttgttggctcttctacttcataaatctgtgatttgggagaagtttcttcactcataaaacaaagacaccaatgacatgaagaacataggactgttctacggctaaatgacataatatttttgttcatatttgcttctagtaacctgttctgtttctatactgttaattataatgtctcaatttttgttactaattttatttgagcctttactcttttttcttacttaatccagctaaggatttattatttttttgtttattttctcaaaacatcttagtgttgttgatcatttgtgaagcttttggtcttgatttcattgacctctgctctgctcttcgttatcctgttccttctgggctttggggtgtttttactttttagctccttatggaacaatggttggtttttaagatagtaatcagtttggatattaattactattaatttctcagtactgattttgcttttcatatgttctatttgcattttaatttgtttcaagaagttactctatttcctctttgacctatttagcaatctggcatttaatttccatgtattcttatggtttctaaagtctatattttgtcaaaatttgattttaatacattgtgcccaggaaagaaacttggtggatgtaagtttttactaattggctgaagtcaacatactgaagagaagactgcatttccagtgcactattcataatcattacgaaatggaaacaacagttatctgtcacctgatggatgggaaaagagtgtgcatgcgacgctctttaaccatagagagaaagtactcctctcatttgcgatgacacaagaggcctggaggtcattatgtttcacaaaataaattgggcatggaaagacaatatggtgtgagcttcctctgtgaaataaaaaaaaatattagtctcacagaatttgataatagagtagtggccactgaaatctagggagagaaagggacaggagagagtgaggaaggccatttggtgagtagtaatttgacagctaggagaaagatctagtgttccattgcacaagttgacaataaaaatactgcatcgtgtatttcaaagttatagaagaaaagactttgcatgtcttcaccacaaagaatagtaaatgtttcaggagctaaagacatggactctgagttgcatgttgcacaatgaatactgtattcaaacataacatggtacccaactaaaaatgtacactttttatgccaaaaccatgcttaaagatgattataatggagctgaaaagttcacttagggtgatgagccactcatcatcataacttcttaatgcaacaaattagtcatgcatttgtactggtacacacaagcctattgtgctcatagtcatagaaaattataatgcatgtaattgggtatagggacagcacttgataataaatgactaattattgggttacacatttcctctattttaaattttgtcactattttaaaatgtactcattctactgtttactgcaaacagtatgctgtgttatgcatgccagagccccataaatcaggtattactacatctattgactgtatcattttctcttgtgcttggtttaacttacagtgtcttagccatagtttctgtaggagcaacaactatgccatatacacatctaacattaactaacataggtagcagactatacataccacccagctttgtctaggtacacattgtgatacttccacagcaaaacccctacctacatacttctcagcatcattgtgctgagagcacatggccttgtcaaacaacaagggacaagagagcacctagggacaagaaaaattgttcaaatatttaggttcattctaagaaggagcaggagctgaggcaccacagaggtcccacagcagtgactccatgatgaagtattaatacatgctaaatatgctcaacttgaaaacactgcactaagtaaaacgagccacacacaaatgactgtgcattgcattattcagtttgtataaaaggcccggaagagggaaatctggagcccggtagtgttataatgttagatttcaaactctgactaatggctgaggtgcctacttaatgtatcatatcagacctggccaccaggttctcccagcatccctgggatcctaccagttacaggggcctcctggcctgcataccctgccccctaccctgaactttccagcccagtaggctgtgatactcttccctatataatctaaccattttggttatccctgacccttactctctttgggcctcctggctgcctcacctggtctcgcccagacacaaccctctcctgccccatggctcaggatcatatctactgtggactctcccagatgtccccgcctctggctatgactccctttaatctacaataaactttctcctccaccgtacccaggagcagtcatgtccttccctttttacttttttcattaatttgctgctggaaccaagggccaatcatatcttttcctatttacttacttacttacttagtttttcattcaggtggtagactggtatttcctagagcttggtattgggaaacagactatgaagtgactgccattggatataaggctgctgttttgaggggagggaaatgttttacagtgagatatgtgataattgctcatctgtgaatatagtagacatactgagttgtatgttttgaatggataaagtttatgagctgtgaattgtatttcattaaaactattcttttcaaaactgttatgtgcaaacatctccttgaatatgagacaattatttggtctttcctgatttaactcaccatggcactttggaaaattacagttcttttatatattattcctgttagattgttttgccgtttcttcacaattagtctacacagcctaaccaggacaatctcagaggggatcctgtattcttctccttgcaccttgtgcatgcctttgttcttttatcactggtttagcttgactgaagtattatagtatctatcaagtatcattccttaatgtcatttcattttttccctttgaagtcgttttactttgtgaaaaggcactttgagactctatatctctaattcttcatgaaatatttatttgtttgtatcagaatgaatgcacacgtttacagtgaaagtgctgcattatggtgtgtctctaacattacctcttttggtttctatattatctcttttatttaatgtttgaatgttatttacttattattgagtgtgtatgtttgtttatatatgcattgtgtgtgtgtgtgtgcgcgcgcgtgtgtgtgtgtgtgtgtgtgtgtgtgtgtgtgtgtgtgtgtgtatgtgatatgcagtggtgggggcacatgttacagggaacatgtagatgccagaagacaattctgtgtagccaggtagtcagttctctctctctctctccctctctctctctctctctctctctctctctctctgtgtgtgtgtctctctcttattctctctctccctctctctgtctctctcactctctctcttctctctctctttcctctcctctctctttttcctctctctttctctctctcacctctctctctccatctcttcctccttctctagttggtacatattgtctttgcttttgccttttttttttttgtaaaatactgtctctctatgtagccctggctgtcctagaactctctgtgtagaccagactggctttgaactcacagagatctacctgcctctgcctctgactattgagtgctgagattaaaggcatatgccaccacacccagctagttctctcccctcctttaaccccctccccctctctccctctctctcatggacgggtttcacggattgaacctgagtcactaggcatatgtagcaagtacttttaaccagtaagcttggtcttcaagctgcttttaagctcatttgtctttctgatatgaaaaatctttgaaatgctagacattcctttaatggcattctctttaggttccatgggaagtataaggaatgcaaggcttcctcctgactctttcatagtttcccagtgctgttggcatggaagttctttaggggaggaggatgtactttcagtagtggacattagtggtgaggctcacagagcttatgttttcaggggtgagggctgattctggctcgagccacatgagtgtttattatgacatgatgagttttcctccagagacagaaagactttcaacacttcctgacatttcaaaaaaagtttccaaaaactcaaccaaatcctatttgttaatcagcattggacagaggtgattgcaaaaaaaacaaccagtgacaaagcccataccagcactactgtcagtctttgatctactccatgtgtagacactaggagtggaaaccctatagggtttctgggagccccaaagaaagttaactggcactatacaccagcattggaaaacatttgtaattttgttttgtttttttgagacagggtttcttggtagctttggagcctgtcctgacacttgccctgtagaccaggctgacctcaaattcacagagatctgcctgcctctgcctcccgagtgctgagattaaaggcgagtgccaccaccacctggcaacatttgtagttttaagtagaggcagaatttgaagacccacgtggacacacgccactctgtaaattgtgataattgtcagtggctgatacccggagcacaatgcttaagtaatgcctgtagttgtccttcaaaggacagctgttgtctatgctattgttgccacacttgtcttcagatctaatgtgtgcaagttgcttctgtttctgtgggtggctggctaaccttgcaggtgagtgttgtgcagctctcaaggctgcctctaacagctggggaagcctgcgttgctctactgtttgcattttgtgcttcacagtttcatccccatctcacaccaaccattccagatctgcttaagagacattatgtctatatggagccctccagaaagatcagcatatgctgcgtgtgtccatgtgcacatgtatatatgcatacttccacagcgtatgtgtgcttctgtgtataattttattagggtggctatgcctgggggaaatgctacttccaaagctgtagaaatgacgagaaagaagatagtctttggctttgaggtccatatgtgtcattgcatcagtaactggctgttgagcaactgtgcctcccagtgactcatgtgcttcaagtaggccatttgctctggcgacccagagagactgtaacctatttttccaaaagaaaaaaaaaagacacaacacgagaacaaagaacaaataatggcaactcatttcaaaggcatgttcattcctaaaacaggtaagccatgtctgttgcaggtgtacacctgatcctgtgaatacagcttccttccctccctccctccctccttccctccctccctccctccctccctccttttctccctccctctctccctccttccctccctccctccctccctccctccctccctccctccctccctccctccctccttccttccttccttccttccttcctttattttgttctatttgtctctgtctgtctctccttccttcctcccttccttccatctctcccttccatctctccctcttcccttccttccttctgtctttctgtctttctagggagccttactggtatcacactattgtgggtgctgaggatgtgttactgagacatgcattgcttctgctggcaattgtgtaatatccgggtttgcagaaacaaagcctctaatcagtagcatttgtcagtttctgtggtataaatatcccactgtagccacttgcaagccttctgtgtcctgtgctaccagaagatgtggacacagtcaccaattgcaagccagtatgagtgggttcctacatacagcctacccttggtggccaagagctcaaggccaaattgaggagacgttacatttaaaatactcaaggcactttcagcctgtgataaggacagtgagagggaacactggaaaaatagaatgtaataaagtagtatgaactagatggcaaaacactgtttcctagaccagagatatttaaatttagactttaaaagttcaaaagattagcagaagaagggaaatgtcatttctaagttctggggactgaaaagtgagggggagaggtacatagaatgagtctgaagctaagctacaagtcagaacaagaatgtggattttcatgctaaaagcagggtttttcaatttgtaaacttaagcattgaaggaaatgacgacattgtgatgtttaaaaaccactctgcagatatcccatttggggcagagcaccagaagagtggctttgaacaagcataacatttatcttgcctgtggattttcagcttgctggaggtatgctgggagcattttgcgaagcagtaaatgcagagtggggttatctgctggaacacactccccccttgtgtctggcaatggccgctgactgttgactaggggcagtggctgcaacactgactagtgaccttccacacaactagttgtcatcttcatagtatgacagcagagctgccaatgtgactgttccgagggacaggtggatgctctattaactattaggacctagcagaagtcacttggcaccacctcctccccatttctgtagtcaaggcaatcatgctcagactcaaggagaaggaaaacactggcccccttgaaggtgagtaaccattctgcaagagcatgtgaaatcagaaatactaacatggccaacttttgaaaacctagtctgctacagtgagtccatctccacggacttcaaatcggcagtgaaaatatggaaaattactggatgttcttagttttatagctacatatgagagttacaattttatctttagagacaggatttatgcattgtaagaactataaatttttaagtgggaaaagcaggggtttttaaatttaaatttatttttaactacagagacataaatattgcacatatttttgagatagtgtatgatagagatatatagtgcatgtgatatttttatcaggttaaatatatctagcccctcggatatttatcatgtcattatagtaaaaacattcaactcctctggtcttctcaaatactaagtacattgctatcatttattgttaccatatggtaaaaacttttttcattcatatttcactgtatcttagtattcatcaatcagcctgcttctccaaaaaccaagagattttaatattgtctcattgtctttctaatgcctggcaaagctgtgcttttaaaattatctttcctttgtgccatgaaatttatattaacttaaaaggtaaattgatctatttcaaggatcagagccatctacctttgcccaatgtaactcaagaggtggtgaatttccactatttgttttttttttttgtttctaaacttcatcctcaaacaccaaaatggagcatggagaaaaattcatgaaaatgaatgttttgcagagggaattttaaatagctgtcttctttctttctttctttctttctttctttctttctttctttctttctttctttttttcttcttggttttttgagacatggtttctgtggctttggaggctgtctcctggaactagctcttgtagaccaggctggtcttgaactcacagagatccgcttgcctctgcctcctgagtgctggaattaaaggagtacaccaccaccgcccggccagtgtctttcttatgtaccagccttgtttcatgcaaggctgtaatgcacttaatgtgctgtttgaatgccaactatgtttcttgtgttatttatttattacatttgaatcaactttttggttcttatccttgctgttcttggttccaactggaacagacacacagaccatcattaactggagactaatcagtgtgcatttattgactactgcagagtcatgcttagaggattgacaggaaacagcccattagcagagcccattggatttgaatccattttcatttttttgtggtgtgaattggtagtctaaaacaggatataaattatatctgcagggatcccagttttgtaagacactatcattgtacatttttaattctttgaacatatccaaatacttaccccatttgaggagctaaagcattacataataacaaaagccttaaaaacttaaaaaataagttattttgtcataactactatttacaacaagcttagtgtgtatgacaaatgaacaaaagggctggggtggaactaagtgatggagcacttttccagaatgcaccaggctctgggttcaattcccagtgttataaaaacaacaaaacttaaaaagttcaaacaaaatttgtgaatttgagactttcaagggccgtgttgacctgcctgcagaccccaggacaggaattcccagagtgggcaggtggaagttgggcccaaggcaggggctgaagttcaactctgccctgagtcggggagggagcagcccagaaattcagcagactcaaggtggcttggtcctcaggggccagtcgacctgcctgcagaccccaggacaggagtttccagagagggagagagatagatatatggtccccgggagaaggggaaagggacaagatctcctgagaaaattgggaacatggggggaggagagagggagctaggagaatgagaaggggagaagaggaggggtgaagaggacatgagggagcaggaaggttgagccaggggaagaatagaggagagcaagataagaggtaccataatagagggagacattataggtttaaagagaaatcaggcactagggaaatgtccagagatttacaaggatgacaccaactgataatttaagcaacagtggagaggctaccttaaatgccctcccctaataatgagactgatgactaacttatatgccatcctagaaccttcatccagcagctgatggaagtagaaagcagtcacccacaactaatcactgaactgaactggaatccagttggagagagggaggagtgatgagcaaaggggtcaagaccaggctggtgaaacccacagaaacagctgacctgaacaagggaacgttgatggtccctagtcagatcactgggaaaccagcaaaggattgatctagaccccctgaacatgggtgtcagtgaggaggcctctatggggcccctagtagtagatcagtacttatccctaccatagtagtaatggacttcgggaccctattccatatagagggatactccctgagcctagacacacgggggagggcctaggccctatcccaaaagatatgacagactctgatgacaccctatggaaggcctcactctccctggggagcacaaagggtatgggataggtagggtgttagtgggggcaggagaggaggggagggagagggaactgggattgacatgtaaaactatcttgtttataatctaaataaaaaatggaaaaaaatgcgactatcagactatcttctaaaatggcttttattcacgatcatatgttaaattgtgtttggtgtatgcacacttgttctctgtgcacacgcagacatgaggcatgttatgataaggctgaaccttggagggttccatggcaggcaagggtaactgaggtggaggacaagcatgccaggcagacagagcttaagtgagaagttttattagaaaggggaggtgggggtggaaagagacacagacacaagaggacagaagagaagagggagacaggaaaagtcctctctgcccccaggggaacagagggagacagagtggaaagagagggaacagagagagcagagagcagggcaagagagcttaaatgggcgggggttccttcttttaaatgagtcctttgcacctgggctgaccagggcactgcctgagtgtattctgccaggtgacaagagcaggccagcataatgcctgagtccttataaggaggatgctgggtgttctggtctatcattcgacattgtattactttcagttggctataccaacttttcacgtgaggtctggggacttgaattcagctcctcatgctgtgtatcagtccctctttttcttacccttaagttgaaaattttaatctactttttagtctttgaaattataatataattatatcatttctccctttcctttcctccctctgtttatatcccatgttctctttcaaattcatggcctctttttctttgtttatatctatatatctcactctatatatcattatatataatttatatatgcatataaaattaaatacattatatatatgagcatacatatttaattcctaaatataaaaatgaaatctgattattctatataatgtgacttatgtgcctataaattttaataaaaatcttaaatcaatattttatatttcagacatttgttaagtttggcatatttagccatccctcttttcatgtaaccatggtactgaaatagcaaaactggtaagtagttgaactgtgtcttccctgaaattgacagcaaagatagaatacaaatatttcagtgtacatttgtacttgtaagagtcatttcccactatccccagcacagacacttctttataaaattcatcagttaagaggctcaccttggctgtttgctagcttgcctagggggtcttaatggattatgaactcttgggtcccacattctgaagatgttggctcacaggacaggcatgaagatgagcattgcgtgatgtccaaagtctccctcatgctcctgctctcaggctggcctgagaatcactgatctgctgtgctgtgaggttagacagcggccctgattgtggttctgccagtttgaagtggtgtcacatttaactgtccttgttacaggctaacagtgatgtaggcttacagtaaactgttttatattcatttgctttacatggaagccacagcctgataacaaacaaggaaaggcaatctaatttagaagtctcatcgttatttctctttgagatttgtgtatcgactataatgttttatatgtaaatatgtataatgataatgataaccattataatgataatctggctagaatttttttgtccagattcttcaggcacctcacactaaacacagtgaatgaacaactaccagcaatgagaacagttagaagaagtggataacctattccccataaatgtagatattgctatgtggcacttccaaacactagatttccacaggaagaatagatagaggatatttccacactgaggaaactgaggcacagagcaaggcacacatacttgaagttgcatggcacactcatgaatctgtgtcaatagttcagtatggtctatgtagcctttatgtgagagacacgtatatgttggcttccattggtgggaacataggattctgttggttctctgtgcagtcttgaggagagtatgctaagccttcctctggctttgggatggctttgaactgtgggaataaagggggcagcatggagaccactgccaggtatttctatccctactccacgtgagacagacgtttgtgtcttccctatggatgtcttcctcactatcccttaacttggtatactgttcagtgactcatgtcttgttgatctgtggacaaggttgttatgctgttgtttgtcctctcagttttgttgacaagcactgtggtgggagtgtgctagaaatcagctgggtattggaaaccatgccatacagcctagtgttcaacctgaagctcctgcatcaggacacacgttgatgggtagctgctgagcagggtgggtcctcagattttctgcacttagggatctctgtgtgaaagctataggccagtcatctccagaagaaaaagacctaaaatagaaagtagatgtgatacaaaggctctctctctctcttctttctttctctccctctctctctctctctctctctctctctctctctcacacacacacacacacacacacacacacacacacacacacacacactagttggtctagtaacacaatcggctagatccaagtatattaaggaagttagcagatttaaaaatgcatttatgtcttcaaaactgtaagttacgtgaagcttccttttcttattgccattacattttggctatctccagacatgtcatttagacaaaatatatatgctctgcatcaataccatttgaatattttcattttctctgaagatctgatttgcaattagcatggtttttgtgatcctaaggctttcctcatggctgtgatttaacattctcaaatcaggtctctcacattataatctctgtaggctttctgtctgttcttcacctgtacttcctgctcccacccttagtaccaaagggctgttaaatcaatgctgttcttggccattttcaagttgggaagatataggaaatgaggatgtggaggatggatttctctcagtgattgtgcagaactgaaatgagaacattggttaataaaacataaaaagaattcctttgaaattttccaaaccattgtctctcgatttctacttgagtgtggctatatgtgcctgacagctgggggtgtgagatgacttttctgtggcatctaaaggaccgtgaaaaccctgtaaggtgacttacagaccacattatctccagctttgtgggtttattttgcatagctgagaaggtcaattggttattggtgctagagggaacaatcttccttttgcctacagattagagttaacacattagaattgagcgcaggggaggctggagaggttgctcagcagttgagagcactgccgttcttccagaggaccagagctcacatcacagcacctacagctggaggctcacaactgcccatgattccggatccaacaccctattttggattctcacggcacacacccagatataaaaatttaaaaaaaaattagaatgttaatctagggctctttttgaactttttgaagcttgttcagctgaggactatgaggactggtccttctagctttcagcctggagttctatttgttcgttcctcacactgaggactgtgaaaggttcttcaagactttccatccattatttttagtcttcgaatagcatcgtttaagcaatttaaattttctggttgctgcagatggaaagttggaggagagacatggaggtcacacagatggcatagcaagtctcagttgtgccatctcttcagctttgcaatgggtcaaattccttgacatctgtgagtgtgttcacatatctaagtcgctcaaatatggttgccataatgagacttgtgcactggaacatgccagcaggagcttggatgcccgactggcattaaacccaagagctagttcctgctctcatagactgagctcaggggaatacatgagatgggggaagtcctcagtacacgtttcttttattggttgatgaataaaacactgcaggccaatagggaagcaagataggcaggactaggagacaaggaggattctgggaggtgtaggcacaggagtcacgatgtagtaacacgtgaccagaggagtagcacgtttccccacatgtctccggtaagaaaagaccaggtgaaaatacttagattgattaaaacatgggttagaaatgaagtcagagctagccaataaaaagccctagacattggccaacagtttcataattaatatgatgtctcgtgtgttatttgtggtctctgaggtgctgcggaactggccagaatccggtaacatacacgagaatgaattgtcaatgatgaaaccctggcttggggatggcgcacaagccttttagagaagtcatatcaaaatggagacatgagcaacagttaggagttgtcaggcagttaggagaaataaggaataccccgaccttctttcttgtaaactgggacactgcatccttctcttccttgttggagtacagcaagaagcagacaatgaacggacacatgggaacggggaggggtgggctggcagttccatgtaggtcaggtatgaaaagtaccaccctaggcattggggttccaaagcatgtaagatgctgtccctatattcctgagcctacaaggccagaagcctgcctgtggaccccatatacttccgttttacagctcttcttccatggtatggtacatgtttgtctaagtgtctgaaactcaagaccatccatgtagggagtctgagtgcttctttcctattcaccatggaatcctctgtgcacagcagttcctagtgcccgtgagcttttaagacccatcattctgccacagatgcatccagctatatcttctcttctgaccgtttctgtttatacctgccagactttccaactgccagtacctatgtatatcctttgcctgaaggctttgtgtggctgctaagtaccctttagctcccaaaagagggaggttgtagatgctgagaactgagcctcttccctagcttctgccagtggatcacatagcaactgtggatcagtatcccatatgcctggtcttttgggagagaaaagtattgtggactgagactccctactggtgagaggatagaggctcacaggactcaagactccatagacacttaaaggctcaagaagccaatgcaactagcctcgtggtggtggtggtgcatgcttttaatcccagcacttgggaggctcatctcttgagttcaaggccagcctggtcgacagagcaagttccaggacagcctcaaacaaacaaaaacaaacaaacaaaaagaagccacagggcttaggaatctcagagggtaacaagattcaccacatccctctccttcatcataaaagcagtgaaagttctgagaaaggagaccctcccatcagctgccagttgttcaagagactccagggatacaggtttcttgaattttcaccaggggttggtgctctggtgatgcagctgactacttctgaatcacacatgctcctttaattaactccaataaactcactggttcaccaacctagacttgagtggaatgatttctttgttctgttgtcagtgatctatctgtcatgaacagaaatctgtttatgtctccccaggagaagtcattcagcaactctgagataaggctccctgagtctccctggtgctatccaagccccccttagtgacaatttccttgataatttgtcatcattttctctactatcttacttcctaacagcgattcttagaattctctctcctcccaaacaagccactcaccctggaagatttgtatcaggttcactcaaactaaaatatccattgagcatctattcccctgttctatgtataggcaatgttgctcccattataagactaaaaatgccagtttctctggcttcctttgtatctaggtttggtacacaatctatactgggacaatcagacatatccatcccagcctctgaattggaagcttatatcaggaagaagggagaagtgcccagatatttctgttgacagacagtgacagacaacttgagtggcagcttccggaagctaacatcacctgtggtgaaaccttagcaaacaaccatggatgtgatagtggcttcatggaaaattctgctttgatttgttttgagggctattcctttcccacctctgagactggctcttcaatctctccagtgtctcttctagtaagtcttttttcctataaaatatcacttaatttctgtagcttgtacctgagaatgctgtttgtgtccatcaggatccagccaagaaaagaacccttgaggtcttttgaacagatggaatttaacacagatagatgattaaagggtgataagaagccaaagcagaagcaacgaggtgaccagagaaggggaacagctgtaagatgctgcctgccttcttcctgggccagatgaacagtaaaagaagcatgccatagaagccattatctgacagcagctgtctggacagactgaccagttaggttgggagcagaaaaaaaagaagtcagaaatggacctgaaagcctataggcacacacaataggagcacaaataccttttggctaaatgagtgagaagagtcatggagaaggctgggtcccaaaccttagagaaactcttataggatttcctataagatacagagatctgggggaaaacaagggagaccaacctcctggaagccacagctcaaaagcaatgggctctgccagaatcctggctaggtttccagcagctggtcctctgagttagtcactgaatcttgacaggagacgccaagcactcatccatgagctgtgggtatccataacttctaatccaggatcttccctgggtaacacggcttcttaagtaatgataacagtgcttgccaattttaggaaggcaaggtaagaagcaatgagttagatgtttagatactcagcaaaacagagaaatgtgctacagcaggatgttaattgacaaactagagatacgtgcacttactctcactttgaatttacagactccatggcatagcttacaggcacaaatgagatataatgcctatgttagtggcagccctgctttgctgggtaaaagaaaacaaaggtctaagtttagagtttatcaaaagaaacaaggtatggattttttgaaaacaataacatagacttctttgcggtttctatttgtctatcttatataattttaactgaataaccaataattgcatttattatatgtaccataatgttctaaaatacatgtactttgtagaatgtctcaaacatgttaactatgttaactatatatgtatcatatatatagagagaaagatagatatgtgtgtatatgtagatatacattctacattttttatctattattcaatggaatcttaagatgagcccacctcttgcctattgggaacagtattgcaatgtatatggaagtgttgatatgaaaaatagcatcaatttaagattcgggaagatctcatgttaacatatctctattgtgcattcatcttgtattttacatacattataaaatgctttttatcatattctttaaaattgtaccataatataattccttgtttagaatcctgagagcttgccatgattctatggtcaaagactctagtatgatactcagcaaatttattcctttattcaattggctttctttttcccatgggtctaacttgggtgagaacagtgtgaatataaactgaaatgtatctttgtaggaggaggctattgtgaatttggtcccatagagaaatgcttgaagagattaaatccaaaactcagtgttctgcttattgatgggaacatcaaaatccatgggatttttatatatttaactattatatatttatgaccatttactctggattttagatggttagaaagaggctcatttgtgcttattttgcttcttacaagatcccctacttgccacagaagctataaaatgtgtgttatctgatattttatgggattttgttctcctatagcttttgaggtgtttctgtgacccaaacaaggcaccccctgggcctgggtactgtttctcttggacactgtatgaaataggatcacctcaaggacctgtactaaggacccacaccctttctgtatgttaccagcagcctgatgttgctaagttacccagcaaagcacagggcctctggaccatctggtttctggagcagccgtctccagctcagctgttgaaatcggagcacctttattgaaatacaaacacatctgtgctccaggcaggaaagtgcttcatgacgtgatgtcttccatgttggttagtattaattcagcacgattgggaactagccaaggattgagactccccctgatgaagactcacagatggagaagagaactaacatatcacactcagacactgtgatgttcactgctggacttgcctttagagtgccacgtgatgctcaagtagaattagacctgctgccgtcagctttatctttacaaagacaacctgtattgtttacctcatccttccattaaaccttcttcttaattgttaattttttttttttggcatctctcctcttacccactttattccctcaaacagttaggaatatatattcctttacaagtcacctgcttttaactggtggtttgtaatgtgactttctgttttagaagatataattttaatgcaaattttgttcttttcatttggaagtaaatgtgatataatcctgtggatcagagtgttttggaaaaaaaaaaaagtaaaaaacaaaagaaaaaagtttccccttctttctaattaggaggctgggatggttagaatgagagtgtaccccattggctcaggagttcgaacatagtccccagtaggtagcactgtctgggggaggtttgcagcctttgggggatagtagaacctccgtggaggaagtatgccatcaggggcaggctttggggatttgtagcctctctggctttcaccctttatactccacggctgcagttaaagacatgatctctctgctttctgctgctgctgccgccatgcctgatgtttgctgcgtctttcccagggccctgctggagtggattcttttcatttaaaaaagattaatttttattattcttaattacgtgtaggtgtatgtgtctacataggggtatatttatgtgagttcaggtgactgccaaggccagaactgttagatcccctggttctggggttcgagaaggttgtgaactgcctgatgtgggtgctagaactgagctgagtcctttggaaaagcagccaagtgttcttaatcaccaagccatctccctggccccataatgcactcttatccctctggagccgtaagccaaataaactcctccttaagttctctcatttgtgctgtttcatcacagcagcagaaaagtagctaataacagcagccctgaaggtggcttttatagacaggaaaaaaaatgccttttagcagaggaggaggaggccatgctagcagcccgaggagtggatgaaggagggcaactcctccttctgggctgctccccaacagtatacatcatgaagcccacatcagaatccctacaagaacaactgctcctcttctttccttactattagtcatataaaataaaacaaatagctatagttaactaaattttattatttcaggatgaattcagcagaattagccactcattccaatagcattccccattccagaaggaatatacctctgctgttctgctgttatggcagctaaagatgtctcttacacccctttctctttcatgaattttcccagtttgtgttctaattttcaatatttgcattgttcttaagatttattttggtgtgtgtgtgtgtgtgtgtgtgtgtgtgtgtgtgtgtgtgtgtgtgtgtatacgtgtatatgcacacctgcagaagccagaagagggtgccaagttccctagagctagagttatatacagttgtgagccacttaacaaaggattgtgagccaccttttggacgtgctcagaactgaactcaggtcctttataagaacagcaggcgcttttaatcatggagccctcttgagccctgaaaccacatttgattctctttaaaaggacttgagattttttgcatctagaaatagtcaccagaaaaccctgctgtacttaggaggctgaggcaggaaggtactgagttccaggttaggctgagctagcttcatagttaagtccaggccaatggaggctgaaactatatagtgatatcttggttgacttttttaaaggtctgtcttgtcgattgactcaattcagtcctctagatggcatggatattcttattgttaatcacttccaccccaaacctccaactagtagggaaatgtggtgatcatgaatgtcctatatcttaggtttcttttcttgggaatcagtgtttggttctctgttctcatcctagtagaccctggggtagcatttggtgtcctggattgtctttggcttcagcatctttgaatctcattctgtcccctactgccttgtctcctttgtgccattctccttagctaggtccagctcctcaccttgatttccaacatgaaaacaactcaggacccagttctctgggcctctgttcctgtctacctggcatctttttgttctgccctgtctgtataataatagtgatgatttccagatctgtacttttccttatgttttgcccccccactagctgttcatttggcatcatcccatggatgctctgtagatgtccaacactgtgtagcctgcacaaaggtctctagtgcctcccctctaccttcatcctcacaaaatttacatgtcactttgaaaaatgcaactaacacccagcaatgttcttgttcaagtgaagaatctttcccttcgcataacatatgaaagccatttatctatacctatggttctacttcccacagattcctcaatgttcagttctttgcatttccttgatgacttccttagcaaagtttcaatggcatttacttttataagccagcagaatacctttttgtctggtatttttgctccatccctcatatgtaagaaactcccccaaagcataaattgtattatatactcaacatcctgtcacctatttccatctctatgacttctagaaacctccacaccctgcattttgcctactgaaactttgtttggtttcttataatacaactccctccacggcctttgaccagcccttcttctggttggaataagcatctttcatatcttcctagaggccatattctcatttaatctgaagtatcatctcctcagagtgtcctttcccagacttacaaagataatctacttggtaattttctttcccatcagcctactgtaattccacagatgatcattatccctgcctgatgcatttcttgtttacttttctgtctgtctagctctcttcctgagtgtaaactgtataagagcagcgaccttgtcagctacatcatatagcttgacatcagtgactagaaaagcactcaatgcctgtcattgaatagatggattcatagaccggtgaaatgcacttgagaatcagtctgccaatgagtttatttccacaagtgacaaggccagaaacaaacaaacaaacaaacaaacaaaaaaaaaagcttgccaaaggtcaagtagttactaggctaattggcctgttgttgtatatgtgttcattgctataatgctttggactctatcataccagacctagtttgagttttactttttgttctactggtgctgtcaattctatatcttagagccagggatgatattcagtctttctggcattgtatcacttaaggttgctgtgggcaaagccaagggcatggtttatggtggcacttgtcaatcatggttcagctgtgtcccgaggcagttgtacaagccctaactacaactctgaaaactcagatttttgccattatttcctgtgactcgttgaaacgcagaattctgtcaaaccagatattcaattgcgtttaggcagagggtaatattagaactgttttgttgttgctgaagtgaccagtttatagagtctttgtggtttgatggaaacagctttcatttggaaactgacctttccgtcacttatgtattttaatgaagaccccaaggctctaagcttcaactctttcaacagtccactttgttgttggttatttttttaaaagaaaattacagggagataagaggggatgtgtatggggcagagtgatgagaatatcttatatacatgcagaattgtcaaatagccaaactaaccaatgggaaattaaaatgttaaaaataatgtagcaacaaaagggaaagaggaaaagaaaaaaaacaatggaaggaagagagaaagaagggagggagggaaggagagatagacagacagaaggagggatggagagatggacagagaaagaaaacccaaaactcagaactttctacttcttacttatcacatatcaatagaggagagagactctgaaaggaatgagacaggcccatggttggattagatgagctcataaatatagaagcaaatttgctaagtttaaaacgcatcgcaaatgcagagggttaagtgtaaagggcagcttactctagccagctgataatgactcgaatatacagtcatctgtgatgactgattcttttaaagtccttgttatatgccacaattttagagcaagtgtattgtcatccactgtacttttgaaaggtaatttcaattcattatttcaataaaatatgctcagtggagccaatatgaatagtattttaaaaattaagaagtaccttttttctttaaaccccacaggctcaacttccagataagcaagtcatgcagcattgttttaatttaatgttatcggccactaacacttagtgctttgttatggatcagatatggttgtaaaatgtggtatattaattatggtcaaaactcacactcagtctatgcccccaatagtggcacttatcttgttttctgcttgagcaaactaagggtcccagagaaggagatgtttttccagtgtcacaggcacttgagttcaggcagtttgactcccaagttcatgccacaatgaaacttggtagcttcccaaccgagtgctgcattcacagttagttgcatatgatattaacactttgggttatatgccactcacttggccagttcccaattaatgagacttttttgtctctgcttgtttttaattattaaaaataaatgataaaaaagtaaatctacaaaattcaactgtgttgggcaaccttgtgccctatgtaagtctgtctaagggtaaatgtctctaagtgtgtagttattagatatgtgtgctttctaataagatcaccaaactgccttccacaatgatgaaccatttctgcctaaagtctgtaagccatgaggagctctgagagaacctgtaatttctacatgcctccattgttgtcttccactctcttttcttatgcacggctttgctgtttgacaaggcattttaccacatgtcaagcacatttgggggaatgcgctcaagtttctataaggtctaactctgctcagaggggatgagctggcatatggtatttcttggcatgtgctgcctggcaccttgaggccatgaaagaattaccatgaggctggttcacctgggcttagcctgatctatactgacagctttactggctcttaaacatttatccagccagaacctttaaaccaatccaaggtttcatttctttttactctggggagagaagggaatcagaattgtgctgagtgaacttccacagagaggtgatccccctcaccccaccccttccctgcagacatcttacaaactggaattcatcctttctttccagctgtaagtcttttccctatcagtgtttctctgaagccattggtatgtggaaagtgcattgctggtgggaaattactgagctcattcagtttctatttaactctttcatgaatgatttgctttgtaaaggaaaaggatggagtaagacagtgtctttggattcctttctggctgctgggataaaattctctgacaaaaagcaacttggggaagggaaagtttattttagtccacagttctaggtgaagtccatcgtggcagggacatcatgacagcgggagcttgaagccgtcagtcactcttcatccacggtcagaaaccaccagcaatgtgtgcatgcgtgctgttcactttcctttcttcacatatatatcccaggatcccagggggaatggtgcctcccataatgggtgtgtcttcccatctcaactaatgtaatgtatctcccaagagattctagatcctgtcaagctgacagttaaccctagccatcgagtatatgatacctgcatctgaaaaacctctaatctttgccagcttttctggagacagagatggagaaaatgggttccacttaaaggtgtgactttagagtagtaaggaaaaatataagggggatttcagaattaatggtacccttcatgtattgatgagaacactaaatattaagcaaatgaagtgacttgccattgtttactcagtcaccagagaggaagtcatatctcaaactccagatctggttacaaaactcaagtgtcctccctgtaccggtgtgtgttctgcgggcctaatggcttaactattgtgggttcccaggaccttttacaccatgtgttgacatcctgtgtactacagacacctggaaatgctgagtgaaatggagcaaaactgttctgcatatacatgcatacgcatatatttgaataaggacttttctagaagccactgtagagttcatcatggaactgggagggatgtgacctggcttgtctctgcccagcctcctcccttggtctccaagtggacaggcagctgctgtcagagcttggcaccgtctcagctccatgctgtagtgtgcttgctttctggcctgcgctctccattgcatatgcgttgcctttccgctctcgtgcagagactccttggctgcaccagtctgctgtcagcaggtggcctgctggccccaaaaactttctgcatgatttactgtgtgcattttctgcacactgaaacttggcatgctccccaccacacacacttcctttactccactctctcttgcatatgccatgctcctgcagaagccttccagattcttgttgaggagattgggccaaagccagactttcctcaaagaatcagttcatttccactataagatggaatgcctcatctcttatccaaataaagcatcttatatatagtcacttaccagctttaaggacttccatccctgactctatatagcccctgaatgatcggctcatagcatctcaccaccctagaatctattataggtcttgccctgttcagaaaaatgaaagcattacacaggtggcaggcaggttccttcatcagttaggtacccagtcctctcctccacacatatcccccttcctccgttattctgggtcccacttgctttctcattcatctttacctttccagacgctattctctgtcccttctccactctcaaaaagtaatttgagtgtcacctccactgggaagtgtcatcagattctattccctgtcttattcttccatatagcccaaagagtacttgcttacaacccttaagcacactgaagagtagctgcccttcactgcagcctactgcatttacaggtagatttggggtctccacagtgcctagtttcacaatttccagtatagtgtatcaaaactatatgttataattctgttcatgggtataatacaagtatttgggaagtatgtacaagaatgttaataactggggctggagagatgactcagcagttaagagcacctgatgctcttccagggaacccaagttcagttcccagcacacacatcaggctgctcacaactgcctctaattccaactccacaggatctgacaacaccttcttctggcctccacaggctcccgaatacaagtggtaccacaaccccccccacacacacacacaaataaaaataatttttaaaaaatcttttgaaatgttcgacttcatttgaattagtttcagactagacattatatatagtggaatagatagaaagtcataaccttttcagtaagtaacacctacatgacaatgagtggtttacaactatgattaaatgaactaatccagacataaaagagtcaacagtgtttaaccagctcatataagccaaaggcatacagaagtcatggtctataatgttagaaaccatgacaatggtccctgataaaggggcacctatgactcaaataatgttttttcttgatcaagatgcagggcctttttcatgctgtcaaaatctaaatatttgcataattgtgaatgttgcacatctctgaatcttttgtcgataaacacttcaatttggaaacatcctctatgagaatcacgtgctttctttagggttcaagtctgagtcagcaatgaagagcgtgatctggattcaactgactcaccagtgtgagtgatgtgcttgtcccactcaaaatgccatcacatggcagaaaggaaaattaaaacaaaacagaaaagcactcttcttggacagaatgcagcattttttttttaaaaaagtcactcaatattgacaacaggtattctgtgcatggttcgacatatcaccttgaatttcagcaagttcagactagatctggaatttcactctgttattctgtctttgaaggtgtctgtcaccttagagtgagtttgctctcccccccaccatacatcaatcgcatctcctgagtaggactgggatttgttacccaaatatcatctttgagctgataaattgtttttgctccagttttttttttttttaacatctagaaatagcagactccaggacattttcaaaaccatatattttctctcttcagataagcaggtgaatgtggagatagagcctggaaatccttgtcttggcaacagcatcgccatcatggctgctgcttcctgcagcccccaccctggagccagtccagccctccatgtggatttctctttcacatttctaataaaggctgtgcagtgccagcacagatgggaattctgacccaccttctcacttcatttttcctgcatttcctttactaaggccctcactgcccaaaatagaatcagttttcttttttttttcaatttgaaagtcaccgtgtatagtttgaaatttcatggtagagtaaacagggtgtgttttgctacccttaaattaccacaccccaagggaattttccctgtgggttagaaggtagatcaatggtgcagaagaatgcttggccatctctcaaaagccatcactgaagggttttaagggatgggtggaagacccaccctgaatcagggaatggaccatgcaagccatgaggaaggaagggacatgagcgtttgcccggaccagtcatctagtcctctacatgaatcctctgctcctatgacttctcttcctgaagaaatagccctcttttctctgaaatattttattaggcttccaccaagaccatttctcatgttctttaccatccttcaaggcccagctcatgtttcccattctctgggaagacttccccaggtggcttgacctagaagtgattttcctattgtctaaaaatctagatagatccctggattgctggactttctgtgttctccacatgtgaggcaatttacagcaatggtatgcaatgaaatcacagaataactgaatacctggtggttatgtgttaagtactagtctcttgagatgtatatagtcaggctctttccaatgagaccatgaggtaagttgcaccggttttcccattttacagataaggctcaagtcccatagagacatcatgtctccccaaccaggttagaaactccatttaccatacccttcatttgctaatggacatttttcatagcataaggttcagagccttggcagttggaaattactcaaccaatacttgtccaattaagcatgtgtgtactttaatggaacttaagaccatgataagaggatttaagagagtcagatatgcctcctttccacttctgtcaacatagggactgtaatgaattgggtgtggttgatagaaactggcctaacagctacggagccttagttgctaagtagtgtattccaggccttgtgagaagcaatgcaccttcatatctttagctcatgctctctttatctcagtggttttcccctgtgaaaggatccgaatcttaggaaggcaaacaaaatcttggattcatcattaccaacaaattgcatgccttataaattctcttttggggagtaagttccaaaatttatagtgaaaagggacatatactcaattatggcacccatatcctatcagatgaagataataggtcatccagatgaagccacataaatattgataaatattgtatcaaatacttgtttgcatatgtatgcacatgtgtgtagggggtgttagttcatgtggaggtcagagttcaccacaggttgtcttctatctctcttcgagttagttttcaagatagactcttactgagcttagagctcactgatttagctaggctgatagaccaataaactgcagggctagcattagggctaatccacctgtccccagtaccacagtgctgtggtgagcaggcatagaccagtacactcaacattttatgcagatactggggggtccaaactcaggtccttatgcctgtgcagtggacactttatgttcgagccattcctccatgcccatcagctaacaatttcctgatccacttctttgcccatccaatctcatatggctaaagaacaaaggagcaggttccttttcaggaggcataaaacttgggaatagtgtgcaggtgaggttgtttggacttactcagatgtatcaactgtgcaaattccagggaactctgtaaattctcgttcccatcatcgtggtagatgttatctattcctgggaattatccttctcactgcaacaaagttacagaataccacctatgagcatcctataggaccaatatgctcagaaataatagcctttgggatacccactactaaaggaaatctagttctttgcaaattgaatttccagtagagaaaaatgaaatccaaacccctttgcttgatttatgatgcttcttacaacccagcttcaacctgcttttccagacctaatttatcacctttctttttggcgttctcatgcttcattcaaaccaaactatatgggattctgtggtgatgctcagaacttccaatccttgagccttcaagaatgcttccaagaattccctcttctctcctcattatccctgagctcctccgaatagcaggtcttaaggaatgcctcctttcttgtgactcctgtccaattccatttaacaattaatcttcttcattattagagtcccaaggataccttgcttatcatatgttttattagcctcatttttttaagcttctctgatttctctgtcaaactgtgtgctccaccaggctcggatgagtcttaagtaaacctgtttttgtattccagttttgagaacaaactctgacctgaatctatttcaccctttttttaaattgagtgtttcctacactgaaaaagcaagtggggacaattcttaccctgggattctaagtaaaaacaaaaaaacaaaaacatgagctaaaagggacctaagtttgcttgtttctgggcccaccaagtgctgtgtgggtccctcagtgtggctcagggtagagggggctagcaaatggtctgcattacaaacagatcactgggaatttttttctactgtagcttcctcagatttgaaatgctctttgttgttgttgttgttgttgttgtttgagacagggtttctctgtggctttggaggctgtcctagaactagcgcttgtaaaccaggctggtctcaaactcacagagatcagcctgcctctgcctctcgagtgctgggatcaaaggcgtgcaccaccactgatttgaaatgctccaaaggagcctatacatggatgctaccatttcttccagatgtgttcttttatctgtgtgacatttgtcatgccaaagaactttgtgaaagtatctggcatgtagatgcttccttcttccaccaacagaatgttttagtccttaaagtaagcagaagtatcatctcaggggctttgacagtagacataaaaagatagcctgaggcatggaaaactgccagctactcctctgagtgaagagcaaaggggtccaaaccaaaaggtttcaggtccaaaccgtgaaacccacggaaacaactgacctgaatatcagggaactcttgctccccagactgacagctgggatagcagcatgggactgatccagaccacaggaacattgatttcagtgaggaaaccttggaaatctacaggtcagtacttatccctagaataggtgtggactttgggagcccattccacacagaggaatactccctgagccaagacacatggggtgggcctaggccctataccaaaggttatgatagactttgatgacaccctatggaaggcctcaccatccagggggagcagaaaggatatgtgatagataaggttttagttggggggggttgtaggggaggatgggagggataagggaactgggattgccatgtaaaacaatcttgtttctaattcaaataaaaaaatctgaaaaaaagaaaaagaaccactaaataaactccgttgtcatagaaatatcttatgtgtatggaggcagctgtaaacaagtgaatatgatcttgtttggggactggcagagcttctatccatcgtgaaagtctttaatcctagcactcaggagtcagaagcaggcagatctctgtgagtttgaggccagcctggtctacagagtgagttccaggacagccaaggctattacatagagaagccctgtctcaaacaatccaaaaccaaaacaaacaaaaaaacaaaaccaaacccccccaaaaaaatgaaaagaaagaactggcttgggagataaaataatttatttatcagttatgcaggaggacctgagttcaaatccccccctcttctgaatgtcatgtgtatgttgtatattgcctataattccagtttcaaaaggcagggacaggagcaagctggttagaaagactagatgtatcattaggttctgggtttggttgagagaccctgtcacaaagaatatggtgaaagagcgactagcaacatgattacacacacacacacacacacacacacacacacacacacacaaaacaaggaaaaagaaaagtatatgagatttcatggagcatcaaagtaaagttttttaaatatttatttatttcatttatttcattttctgtgtctgttttgcctgcatgtatatatgtagaccacatttataaccagggctcatagagggcagaagagggcagaagagcccctgtagccagacttatagattgttatgggacaccatgtcaattctaggattcaaattcctttgcaagaactacaaatgctcttaaccatcaaggcccaatccttgatgattcatccccaaatgaagccttcttttcaatttgattctcacaatcagatcctggatctggttttcaggcaaatctgctttctgcttactgtagcaaaggcccctctgagtgctgtccaagaggattcagggtttatactttttgctgtggattaatatttgcctaggcttataactccacagccctttttattgtcatttatatcccatctttcaagatttgatcaacttttgaatgcctgtgtcctttccttcttggtcactgttgaatttcctagtaatctgagatgtagcagtgtgtctggacacattgtaaccatgttccttctatagtgtagcatcactctaggcagttcagcatccaattctagaagaattggctatattttgtaattaaaacgtaatttttatttcaaagtcaaaataaaataccaggggatactcaagcatatgtatgtacatatatatatatatatatatggtgtgtgtgtgtgtgtgtgtgtgtgtgtgtgtgtgtgtgtatcttatttataggcagaatgatacattcactaaataagtgagtaagttaagtagaaagagcagtatagacctcagatacttctgaactgtcagtcccagaagtgcctgtcaactttgagccctgtcttaactgatcatgggatatgcatgaggatgaaccacttgaatccatcacatgatatgtacctaatatcagaaaaacatgaggcccagaatccagcagactggcactctatagccttctgaaggaagcagacctcccaaagccacagcaatcacttacagtctattttcttctcagccatctggcacatcaaatcaagaaggctcagattttgaattgcaaagtgatgccccaagacatgttgctataacacatagaactagggaaagaaggaattagtcaagcaagaagattgtgggaagaaatgtggccagatgtttctatgcatagagtgaaggaaacttacattgaaaacctttttttttctgaaacaaaaatcttttgtaattaccattctcccatgacattgtaatgatagcatgttctagagtcatcacggggaatatatggaatgagaatgttggtctctaaaacttatgaaattgccaagatcagttgcaggtccatctttatatgatgtgttgctggctcttgcaggtacagactgacctctagttttttctccaacaattttcctaatctgcatcctcctaggtttcttctgttgaaatataaaaggcaagctataactgaggaacccagctagtggaaccacttggactttaatcactttttacttcacttgggggtcaaggtaagaaagaccacactgcattttgtatttttagtaccttcaatatgctttgttatagtgcatgtattaaactatctcattgcaccttttctgttgcactatatgattatttttaagtgacaaggaaactaaggtgaccaccactggggatatgccaggtgacaaatgtagcagagcatggatgcaaatccacctcaaccacacagcaaggctcatgcactttccatcataatttctgtcttttgctggagggctactaaatgtcaaccttcttttctcattgacattagggacaatttgattgacacagagagaatgcttcctagtccagaatttaaattcagccccatgaagagttttggaatttacagtaccacctgtaaacgtttctaaccaggctatcgtcaggtagccccattaagtctgcttccatcagtgatgatggtcaggaactaaagttggtctctgttggagatggtaccctggagcttgctgtggcaggaactcttgtcagtggtagttgctaccagccctcaccaggttgttgtttcatcatctcctctcaaggcaatgtcttagcaacaagacaaaccatagtctttcatgggcttgttagctgtaggcagttttgtgccataattttggctgcctctctagccatggtttatattacctaaggttatgaagtattcagcctcctcttcatgtacagtgagcattattcccccatagaaatgggaatgaagaaacatgcacagtctcctggaagtacccaaattgaggtttataaggataaggcaggaaaatcccagaatctcccttggatattgcataggagcatctaaacaaattaatatccaaggagatgtcaacatttatttcagtaattctaaatagtcacaaggagtgttggaagagaactcttcagatatcaggtaattatcacattttggcacacgccagctaacactgcatagagtagagacaagcctcttaactgatgcctggctatagggaatggggtgctactctttatgtgagagtttgaactgaaaaactacaagacccagttttcccctgaatcctgctggaccactcatctgtcattaggctatgctgtctcagaatcacaccctcatgcatctatagaacatattagtaatggtgggatgagtttcttgaaaacaggtatcttgttgagtcatctgtattttctaataccgagaatttctaggcaggggtgccctataaatattccttagctaattaaagcagatgctgtgttatctatggaagaaaaccacctctttctgtgcaagttttgcagacataagataggatacaaagtagatttattaagacctgtctagttcctgagttcgaagcacattgacccttaagatcattccaaagtatgcacatcatagaaaaagcatacaaggactgactcttcagtcccttcactttctatttaatgctcctctgcaatttgatacccaaaccttggaatttatttaagaagtcaaatcacattagagcctcatcacaccacccacctttctaattaatgagtcacagcacaaatgaagcaagttttcagttaatgagctacaaataaatctatccgtagatactaattaccactaatatccaaattagttacactccaggtttgttctctttgaatttacattaatttgtctcctttcccctaatcagttaagtctcatctaaagataattgcggagatgcgacttccaggatggagtgtgtagaatgtgactttaacgggtgacatcattaaataaaaacaacccgctaattatttaacgtctctgtacatggctgaaggccatacagaaacgaagaaatatttactcaaggaaatccacgtggtcaattaatgtagacagggcagtgtgcttatacaaggagagaaatgtttcttcaataagtggcaccatgaaaaatgtaatggaaaatggagccttatcttctataaggatagctccaaatagattaaagacaatcaggtgagtataagtccataaaacccttagaataaggtaggactaagccccttgaacttggacttggtgatgggttttatctagaacacctgagatccaggcaacaaaagcaaaaacaaaattggactgtgtcaaactgcaaagcttctgcaaaagaaaggaaatgttaacaaaatggaaagacaagtgtcgaatgggaggagaacatttgttagtcattgatgtgataagaagttaatattcaatatgtatatatacgtgtatatatatatatggaacttctgcaagttaatagcaaaaaatagataatttaatttacaaatgggcaaaggaggactgaaagacaaatgcctgttagtttcactaacttgtagaatttaaagtagctgaaatcaagatatagaaatcaaaatagctgagccaggtggtgagggagaaaaagaaatgaatcccaaatattgttaactataaatgcctttgctagccatggtggcatatgcatttaatcctagtacttgggatgcagaggcagaggcaggtggagggatttctgagttcaaggccagcctggtctacagagtgagttccaggacatccagggatatacagagaaaccttgtctcaggaaaaaaaaatcagaacaaaaaactgtgttgtgggatattttgatcatacttggacactcccaagactgtcaataaagtttaccttgaatcagaggtcagagttagctattaactgaccaaaattggccatagaggttttggaggactggaagcatatagagagacacacaaagtagtagggaggattttagaaagattctagccctttttggatccaggaaggatatagagagaagtcaccggtggcttccccacagtttctcttatcaatcaggttcttaccttcttacccaaatatctgattcccagttttttattgataaagaatacttatatacatgcttcatctggcatccaatgagaggcacaagatcacaaggcagccacttgctgcctactttgcagtttccagagttgccaccatgactggcctcccctcccccccccccaggccctctgtgcaagtctggtgtttttgcattacagcttccctatagcagcttccagctattgctcatccctagcaccaaacactgcaggggccatgagagatacagcaggtgataactggtgatcaacagacagaactacaagatgagtgattctctgatagggaaccccacctggaaaggctatggagtcactgactgtggaagtcagttgctcctgtttgtaatttctctcatgagtcacttcattttttccctaagaatagctttgggtgttttcccactgctcgtgtgtttatctcatgaaaatattccatctactgggtacattatctgtgggtggtgtagaagatgaatttttatttaactatataattttgatatattgactatatactgggacatgcttcataactggatctatttgtcccacaaggactgtagattcttaacagcctgccttgttcttttgctcagactaactgcacacaattagctcactttgacttcagagcaagttcaagctagactaaaggccttttgtaaatagatcataaatttgagacattacagataagtacaaggtcagagtcacagatgtccaaccaatgttattaagaaaagcatgccaattcttcacttgccagtctactaaaagtggatccgagtctcaaagttgtcattgggcattgtgccccccagtctggtcaaggctttgttcctatggccctgagaccttatgttgccatggcaatggctcagctccctaattgcttatcctaggaatatgctcttgaccaatgagaaggtagctcttgtaatttccttatcacatcaaggcttctgtagaagagtttttagaatagaagaagaagaagctggagaaagaagctagaaggaattagaagcagacaggattgttagagtaaagaacagaacaatgaagaaactggtgcagaaaagtacacagtggagaattcatgttgccctcagatctttctaagtgtcatgcttgctttaagctttctagctaaaccttgagaggtctgagaggctgttatccaaaagaccttgatacgaaccaccacccaagttatccacccaccctcgaccagctctgtcattcagggggccacaagccacatcagcttcttccacaggcccccctgtgtccacttttcaggtgccttgctccctctccctgtgaattgcaggcttcccctggacctcctcttccttggaccactgccatgccaggccggctgccttgacacctgctccagctttttctgctgctgccattgccacacattctgagcccccagctatacaagagcagctgcagctgccccctgcaaggctcttcctgcatcttcttcccagcagtgcagcacagtgacagctacccttgcacttccccaagttcttaaaggcagattggttgtttttccaaagagtttttttacccacattaagaatggggaataatattatggtgcagggaggaagatctctgtagagttccacaatggatggcttgaaaatggaaaaattaaatgaaaggataagcaaattagttgggattgatgtaatgtcaattataagcactatcagtttggtaattcatgttttattcttttaaaagaggttgaataagatacaatccttagaaagacctataatgaaactgagaaaaaatccaaacacagacaaaggagtttaaagcagaacccactgcatcattgcattatgaaactgaagaggagaggcccaagattattagacactgaatcttaatttatccagttgccattcaagaatgatcactagatgatatgcacccccaagatcatttagaagttaactgggatcctgcataaatgttaggtttgaaaagatttaaggaagcactagtttcatatagtatgcattcactttttttgagaagcaggtgttaaattcatggtcaactcagaacagaattattcaacaagactggaaagatttagctacagcaatattggaagctggtcctcagttataatggaaaacgttatagagagaggaaactagggtcatgaacaacaaggtgggaaaagaggtacagaaatttcccaagatcagcttcttgttgagggccaaattgctgattttcaaggacagtttagatttggtgattacatcttggccctatgctctatagcaccttgggatgcctgggacagggttgaagaatcaggaaagaggactgagcaatttactaaaattgtacaagacccaaaagaagccttcactgatgttttttttaaaaaagattgactttagctgtgaatagaatgatatcagatccagaagttaaacaaatattaactgaatctttggcttttgaaattgctaattcagaatacaaaagggtgattaggcccttaaaggccaattcagccaatggattagaaatacagctgatatggaacctcagacttaggatgatgcttggatagaagcagtgatttctaaaattttaagacaaaccaaagatcagatgttttaatcgtggtaaacaagggcatctgaaaaggaattgtaggcaaagcattcctagaaacaatgatttttttttcctagagataatccaaacagaaggccccagacttctggaatatgcaaagtgtggcaaatattgacactgactcaatgaatgcagatcaacatgagacagtggagaaggtaaccctttgccataatgaaacaacttaggggacccattgtcaaatttggttcaatcattccctgtcagcatcagaggaactcctccacagaacaattaaaagacttaatgcctattgtttaaaagcataatgctccgaatgacagaatagcttcagtaggtaaagcaaaattttcaggagagaccataaaataattattttggaaaacttctataaataatgaaggaccaaagctaataatacaagtaaatggcattgaaattaaggcttcagtagaccaggaacagatgtaacaacaatttcaccaaaatcttggcatccagattgacctcttcaggaggtaaatgttcagcttctagggattggagcttcatctcaggtaaagcaaagtgcaagatgagttgagtttataggaagagaaggacagataagaaaattaaaaccatatgtggctaacatagcactgaatttatggggacatgatttgttgtagcaatggaaaacacagattaacattcaccaaacattcaggttgtacaaaagcagggcatcaacaactctaccttaaaatggttaaataccaaactgacaaacctttctgggtggaacaatgacctttgacatcagaaaaattacaggcattagaacagttggtaccggaccaactaaatgctcaacctattgaagaattgacgagttcttggaattgtcctacatttgtcattaaaaagaattctgaaaatggagaatattaagatttaggagctattaataaggtggtccagccaatgggctctgcatagcctggaattcccttgaattctttactacctaaaggatggtctattatactaattgatttaaatattgatttttgtctgtatctttacaagaacaggacagagaaaatttttccttcacaatgcctacttatattaatttccagcctgctaaaaggtatcagtgaaaaattgttccacaaaggatacagtctcatcttgtgtcaatattttgcacaatagccattggaaataatccataagcagttacctcaatctataatttaacattatgtagatgatatcttactagcttattcagactcagaaaccttatggaaaaaatgtttgaaaggtaaagaaaaatgtgccttgttggggattacaaattgctcctgaaaaaaatacaaacaggagattctgttaattacctatgatttaagatagatttataaaaattcaatcacagaaagtaaaaataaggacagatcagttatggactaataatgattttcaaaagttgctgggagatattcgctgactacagcccacaattggattgacaactcaataattaaataatttatttccaatcttacaaggtgataagtacttaaatagtccaagcaaattatcagttgaggctgagaaaaaattggctttggttgaaaagaaattgcaggatgcacatatggctcatttagatccagagcttgactgtattctggttattttaccttccatgaattctcccacagaaattcttatacagagagaagtgtagcatgggttctaatagatcttagtaataaaagcccagggtcagataaaaggggggaatgctgaaagatcagagagatgaaggagaaagccacagccacacttactttgttaacttcctagccaaaaagagaccaggcttctgtctcctccaacattgtcacctcctctctctgcccagccatatcacttcctgtttgtctgcacagacctcaagacccctatggttaactagtggctagttctgccctctgatcttcaggcaagctttatttgttagattataaacaagataccagtacaaagaaggtaatatttttgaatggatatctttgccacacggagtaaaaaaaaataattaaagacctgtgtagaaaaggtttatgaattgactctgaaaggaaaattatgattttgtcaattagcaggaatagacctagtagatgtcgtggtgccttttactaatgctgaaattgccttgttatggacagaagatgaaaactggcaaagggcttgcagtaattttttaggagagattagcaacagatatcccaaaaagcaagagactatgatttataaagagaactaattggattcttcctcacattgtatggggaacaccaatgtctagagaccctcattctatattgatgcaaataaatcaggaaagatgtgctataagtcaggaaatttaaataaagtggctcaaagctcttatgactccattcaaaagccagaattatatgttagtctcatggtattatcatatttttcagaacctcttaatataattactaatactcaatatgcagaaagagttgttttacatattgaaacactgaacttattccagacaattcagaattaactctgttatttattcaataataagaaataatcagaaatagaaatcatcccttgtatataacacatatcagattccacatgggtttaccagacccactagcataaggtaatgatgaagtctatcaactattccttcctggacaaatgtgacatctgaagaaaaaggatgaatcattcagagaaaatgtcccaagaaaaagagtaaattaggctaatggtatagcacctttccaacaggaaaaattgcataaatctttccaaatcttagtttcctctgttctctacagacatacaggtctttctgttgtcgcaattcaattgaaaattaaagctggctttagaattggagcatggatctctctttctctcaacccaagcatgcttgttaaaggaaaatccaaaatgtctgtctcgtgtaagaagagccacctggtacgggacagaagaaaaaaccaaaatgaagggactattctgctgccactaacaaagtgcaagatgagttgagttttatagagcactaattctagaaataggcttcatctagcttcctgtatatgatttcgtgcttgagtctgaagcaagtaactaaaaattaagcttgtgtaccccagatataattaacaagttgtggtcctttaacctctcttagatctgctgcatatggcatttaaaatgtttaagttttcctcagtaaaccatgatcatccctaacagaaaccttttacctctccaaaaggatgatggatccccacaaagacaagcccacctggattgtggtaatgagacactaagctgacaaacaccaccaaaatgtcaatttcagctgcaaactgctcaggacaacttcaaatctgctagctgaaagggtccagcctcacagaatactctagccaggacttcagataagctctacactttctcattccacagtgactgcataacaaatgttacagctaattttctcaggatttgaccattatttctattttctcagggtcccctgaagatgccaccacccaaagactacaggaagtaattttaggaacacaacacccactttcccaaaaggtggggtgggtagtctttagtcacttgtggattatagatgtttatcatcatttagggggagttggttgaaaattgttactggtcatagtcatggaagaaactaagcaaagaagattagagttagggctctcattctaaaaagaaaaagggggataaaataggcatgttaggataaaagggtagattattgaacctacttttaaactaaaaatgcaattgctagtcttaaatattttacattagtaaaatattttgtatattgacacacattttttatgtaattaaacctcaatttcttaaataatcaacaacaataataagaacaaataattccaaccacggacaattttatggactccaaaagataaattaatgtacatataagaacttcaacgtgtgagtgcactaaatgctgggcactgtcaaatcacatcctagcccaactgtttggcactgtcaaactaccacatatcagcccaaccaactgacacaggtctgtgttctgactgagataatctgaccaagataatttgctgtaagaccattgttaaaatttgctttataatgtctggatttcttgccttatttcactaaacagcccattaaataccattgcaatgttttcaacagcatttttctaagtcctgtagcactaagaagcccactcagcaatgcttgacataaagcctgatgatgtttctgatttccctaaagttttctttgggaattttttaattcacaaatttaaggttatttttgttacactgtatatgtgtttctacttttaaggtatttttgtatattgacacaaatttaaggctatttttgttatactgcatatatgtttctactcttttttaagttatagtacttttgcagctcatgtaacaatgcagtgtaaatttctagccattgaacggtattattataaactacttaggataattaaaaaatacaggttagtagttagtcatctaacaatcaaatttgtggcaatgttagttatgttttcaaggccaaatagagatacattttagatagacagatgttctttaaacacttcagggacctacagaatatggcatttaaaatattttaacaacataaggcttctcatgacaatgagatatgcttgtccctggcagcagcaatttacttcaaaaaaaggatgatgggcattgaatggcctccatatggagttgttttcattgtggcaaagccagccatctgttcaagaagctgtctgtgtctcaactgctgacagtatactgcccaaattgaacaagcaggacacaaaagcaagtgactgttcaactttgctaagacaaggtgggacagtcctttgaaatccccccttaacaaaaaaagtctgtcagatgttctataccttaggccaaagatggataccccaatgttacagggaaaacctgggtgactgtccaggaagccaggtgtctctcatttctatagttctggaattttttttttgctctatacttcctgtttactcagataatattatatccttcttcagtctttgatggtttgaagactagatagttatagttacagtttttcttgttactaaattcagaaaagaaactcacaaaagtagtgtaaagtgtataagattgagagatataaaagcataaattgtttatctacaataatgtttagaagtctaaaaatagtgttttgggttggtaatacaagttaggatacaaagtgaattaaacacaaaactttggactcaccaagataggatagataatggagtattttctctgaacttgccaaatgcaaatggactggactttctggtaattgttcttattgcatatagtttactgttagagttaaaaaccttcctttttatttagacaaaaagggagatatgtgggatattttgattacactctgacactcctaagactgtcagtaaaatttaccttgaatcagagggcagagctagctactaactgacccaaattagcaatagagattttggaggactgaggacatatagagagataaaggaagtagtagggaaggttttagaaagagtcttggccctcctttggatccagggaggagagagaggaggtcactggttgcttctctgtcatttcttaatcaatcagttctcaccccaatatctgactcctgagtgttttattgataaagaataattagataaatgctccacagctgttatgagagaacaagaaatgtagaggcgggtgagaagaaataggttacttgatgcaaatcacagccagataatttatagtagtacaatgatgatagaattcaacaaagcttgataagaggatttctaatgttctcaacacaaataaaagatagatattggagatgtcaaataacataaacatcttgaattgataatggtacagatatactgaatatgataatgtataaaatatactgaatcatgcatgacactttactcctaaaagttatgtaattgctgccagtaaataagtaaataagaatgtttcaaaatcaaaaggagcaaaggagtggaatagccttttttccccaaataagatatacatacaaatgatcaatatatgcataaaaagaattcttcaaaattactgacaaagagcgatatgcaaattaagacaaagtgttacatcacttcactgattaaaatagccccaccccaccaaagaagatgacacacctacaaatagaggagaaggaaaagggttcccttgcatagcattggtatggatcctagctcgttcagcacctatgcaaaactactcagatgtttctcaaaaaacaaaaaacaagtaaagtgtaaagttaggactaacatatggcacagcgattccactgctgaggagtaactaaaagaaatgtaatcatgtcaaaaaaataccggcaatcatgatcaccactgcacattcacagcaaccaatgtaggaagagaagccaagaatgcactgaccatgtactgacagtgtgtgtgcagcgggttaccattctatcacagagaagcacatgcaggaaactagggaacataatgttaatgaagaagtcagagcaaaggcaaaactgtacaaggctgttcacatgtggaatttgaagaggtaattctctacagagtataatagtggttgccagagctgaagagtgaggataattggaaaacacccaccaaagggcacacaaggtttctggtcactgtgaataggttctggtgatctaatttaaaacaggggtggtaatagatatattgattaatgtgatgatcattgtgtgggacatatactaaaattggaacaatacagacaagattagcatggcccctgcacaaggatgacacaaaaattcgtgaagtgttccctactttttaaagacctgtaccgtaggaattttgagtctctaaagaaagaaattaaagaagatactagaaaatggaaggatctcccatgttcttggataggtaggatcaacatagtaaaaatggcaatcttgccaaaagcaatctacagattcaatgcaatccccatcaaaatcccagtacaattcttcacagaccttgaaagaacaattctcaactttatatggaaaaacaaaagacccaggatagccaaaacaaccctgtacaataaaggaacttctagaggcatcaccatccctgacttcaagctctattacagagctatagtcctgaaaacagcttggaattggcacaaagatagacaggtagactaatggaatagacttgaaaaccctgatattaacccacatacctatgaacacctgatttttgacagagaagctaaatttatatgatggaataaagagaacatcttcaacaaatggtgctggcataactggattctagaatttagaagactgcagatagatccatgtctgtttccatacacaaaacttaagtccaaatggataaaagacctcaacataaatccaaccacactgaacctattgtcatgtaaaacaatcctgtttctgattcaaataaaaaagttgaaaaaataaaagcataacatcattatatatatatatatatatatatatattatatatatatcaaagtgggaaaaacccttgaattaattggtacaggagactgcttcctgaacattacaccagtagcacagacattgagatcaacaattgataaatgggacctcctgaaattgagaagcttctgtaaggcaaaggacacagtcagcaagacaaaatagcagcccacagactgggaaaagatattcaccaatcccatatctgacagagggatgatttccaaaatatatagagaacacaagaagctagtctccaaaacaccaaataatccaattaaaaagtggggtacagaactaaatagacaattctcaatagaggaatctaaaatggctgaaagacacataagaaactgcccaacatacttagccatgagggaaatgcaaatcaaaacagctctgagataccatcttgctcctgtcagaatggctaaaatcaaaaacaccaatgacagcttatgctggagaggatgtggagaaaggggaacactcctccactgctggtgggagtgacaacttgtacagccactgtggaaatcagtatggtgaatcctcaggaaaatgggaaccagtctaccacaagatccagcaattcactcctaggcatatacccaaaagatgcacattcatacaataaggatatctgttcaacgatattcattgcagcactatttgtaatagtcagaacctggaagcaacctagatgcccctcaactgaaaaaatggatagagcaaacttggtacatttacacaaaggagtactaattagcagaaaaaaaatggaatcttgaaaatttgcaggcaaatggatggaactagaagaaaccattctgaccaaggtaagccagtcacaaaaacaaacatggtatgtactcactcatatgtggattttagacatggagcaaaggattaccagcctacaatctacactgcctgataagctagtaaacaaggaggactctaagagagacatacatggtcccctggagaaggggaaagggacaagatctcctgagcaaattgcgaacatgggtagggggaagctaggagaatgagaaggggagaagaggagggatgaggaggacatgagggaacagaaaggttgagttgggggaagaacagaagaaagcaagataagagataacataatagagggagacattataggtttaaagagaaatcaggcactagggaaatgtctggagatctacaaagatgacaccaagtaacaatctaagcaacagaggagaggctaccttaaatgccctccactgataatgagactgatgactaacttatatgccatcctaaagccttcatccagcagctcgtgaaagtagaaacagactcctacaactaatcactgaactaactagaattcagttgcagagaaggacgagtaatgagcaaaggtgtccagaccaggctagtgaaacccacagaaacagctgacttgaacaatggggagctcttggttcccagactgatagctgggaaaccagaattggactgatccagacctcaggaacatgggtgtcagtgaggagacctgggaaatctatggggcctcctgtagtagatcagtacttaaccctagcataggtgtggactttgggagcccattccacatagagggatactccctgagccaagacacatgacggtgggcctaggcccaccctccttggggagcagaaatggtgtgtgataagtagggttttagttgtgggactagtagaggaggaggggagggagagggaactgggtttgacatgtaaaacaatcttttttctaattcaaataaaaaaataaaaaaacccagtgagtggttatgacacttaaacttgagtccactcttcctcacccttcagtcctccctcagcatgctgggagctctactccagaggaaactctcccacaaagcacttaagtgctattgaatctctctaaaatgaataaaatgagcagcatttcccaaccacctcttcagaggccagtttccagatcggagtatataagttatcaaggacttctttcttccaccagccctactgagagctccactggttcaatcaggaacagaaagttgatgatgcaaggtgcagttatccttacctcagctttctcataggaagaatactggcctactgggaagggaaggctatagaggttggtgctactgcccttgcccagtgcccagctcatagagaaagaatgctatgtaggaaaggaagaatgttttcctgctctcagatctggagagtggctcagagatttggccacagcatgtaagaagctacccactgagttgatttagaatagtgtagaaaaggggtcaactcagaggacagtgaactttgggattaacagaatgctgctaactcagtggaagcaaccagcaccacagggcacctagatcaccagagagaaccaggtgaagaaagatcggtgaggatgagcaggatctccttcctcccaaagcctagaatggtcaaggagcctgagttcacctgggtcagactgtgaagcaatttatgcaccgagacattattttagaaactaattagcagcaattaatggacctttacagttgggtgtgactctatcaaggcaagcagtcctacagcaatcacaaaggaacatggagccccactgaccccaatcactctcagccttgtgatcgatgtcatgctcgaggctacaggacttcagggatgctgacagttcacatcatgaacaaaagattctgttaagatataccaaccaatctacttcacagtcaacgactgttaggaaacaagcatggaaagagggaaatcagtatttggagttgctttcctataaaaatattcagttgtcaacaacaaaaatctatgagatattttttaaatcattctcataacccaggagtggggtaggtagggaaaatgggtctcagaaactgcctgtaagagggacctgtcttaaaaggcctttaacatcgctatagtatgttcaaaactaataaaaaccatgctcagagaagtaaaggaataggggatcagatagaaattgaaaatgaagagaaattgtaaccaatgaactaaaccaaagttctagaattgaaagtacagagattaaagtgaaaatccagacctggctggagttgatctgaattcctggatgaatcagtcttaaggacaaagtgatttagtctctgtaatctaaagtaatggagggagcaatggggaaaagtgagcagagccttcaacatggaccagccctgagagcaatgacaagtgtgtaggggacattgaagggagaatgaggagaaggagcaaaaaacttatagtggcctagaagtcctccaattggatgaatgatggtgatgtgtacattcaagaaactcaacttggtctaagaagggtgaaatcaaaggtcccatggtcaccacttatggtgacttttgattacaaagatagagaggaaactctaaaaagctgtaagagaaaataacacagcatgttcaaggaagccctccaaatgtaacagctgacttttctcccgaacaccgaggccacagaatggaatgatgtgtttagtgctgatgaaaaaacaaagcctgtcaaccagaaatttatacacagcaacaacctttcaaaatgaaaggcacagtccacgacattcctggacaaagcagggagaatgtgctgccattagaattctttacaacagatagtaaattaagttcttcagaataaaaacacaagtgatcagaggaaggaatttaaaccttcatgaaaaatcaaagaggcctgagaattaattaagtaattacaaagacagcacaggctccaacccctctcgtttgtcttaacccgcctaagaagcagttgcatgagatggtatgtaaataattacatgtgggatctctaacatatagagatgtgattgatctgatcatcgcagcagaaaggtggtgagtatgagtgaaacaaagccgtgttgcaaacaacaccgtcaccaaccccaaactgtaggaccagatgaaaaggaccagaaaaggtaaacaagttaaggaacatagcaaacatttaagcacacacatactgatcacctttcctctatcagaaactagaggaggaggcactaagctacataagtaatctcagcagtgtatcgcattacaacacaggtagctgtggtgtatagagtactattggcacagaaatgaagcaatagagttctaagcattgtgataaagttagcacaatctaaaatggaggctgaaaagttatggtagttatggtaagggttagagagactgctgagcaaagaaagcaaacaccaggtaatgatgttaggaaggatctcataaagtgagagaaacagtgaaagaatggaagaggcttaagacagatcgttatgtgttgttttgtgtctcttcccaaattctcatgttacagttctgagctccagggtctcaaatatgacgtctgaagtcagaatttttacagaagcatttactttaaaatgaggtcaacaacgtaatggctggctgtaatccagtatgtcaggtgtcattacagggagtgtgaatttggacacagatacagatagaaggaagaggatcagggacacaaccactttcaggccaaggacagaggactggatcagtttcttctcttacagcttttagaccttgccaaacctactggcatcttgatattgaaaatctaatctccaaaactgtgaaacaacaaatttttatggtttcagtcacccatcaattttatgttagccttagcaaatggatacacatggaaaacagaaagacaaaatgccaagtgtacctacaattgtaccagcaatcacacacaggggagggatactgagcaactctacaaaaggcagagtatcagatccaataaaatgaccaaatttaacaatacattgtctgcaaaggacacactttacatccaaagacataaacaggttgaaagtaaaaggatggaaacctgtcttccttaagaaagctgcagcatttatatcaggcaaaacagacttctatacaaaaatcttactgaagatgaagagaaaaatgttattacaaagggggcatagcaatacatgtttaaatacctgaatatagagcctaatcccatgaaacaaaactgaaatgaagaaatgaaagaaaaacttaaaaatgaaggcagatacttaagaatgatggttgaagattttagtgctccaatgtcaatcccgtaaggagcaacatggcagaactgagccacacttaagtgaattatacccaacaggtgtctatggacactgcatctgacaaccagagaagcaaggacatataggacatttcccagctagaccatatgctgggcaagacaaaaacaatcaataaattagaaaggctataaagcctatgcaatatactccatccacagtgaaatgagacatgaacttaataacaaatgcatttaaatgactcacacatatattatgtggcacacttctaaatacccaacaagtcaaacaataatcaacaaaataaatcactttgagataaaaatttacatatgatacagcaaaacttaggagactcagcttaagtggtacagagaggagaaactaaatctattgtctaaactaaaagaaatattcccaaatcaatgacttagccttctgctgtaagactttggaagcagagaacagaaaacacacaataattagaaaaaaacctgcattagaaattaatggggtggagaacagacaaacaatataagaaatttacaaaccagcaaattatttgaaaaagtcaactgtggtgatattgtgtttgtggtctaataaacaaagctgcttactggcttgttcttcatggcttgctcaaggtgctttattatacaacacaggaccacctgcccaggggtggcaaagtgttatgagatctttgtacattgtgaagatgtattggtgtgattggacttctgtgctgagagagaatgctgggaagaaggcagagtcatcagccagatggagaggaagcaagatgggcagtacagagtaaaggtctccaaactatataaagaatgtagatttaaagacaggggttaatttaagttttaagaactagttaggaacaagcctaagctaaagcggagcactcataattataagtctccgtgtcattttgttgtgagctgatagcccaaagaaaaatctatctacagcaaagtgcacagtgagcaggaccctcccttatcaatcattagtcaagaaaatgtccccatagacttgcctataggccaacctgtcagagatattttctgaattaaagttccctcttctcagatgactctggcttatgtcaagttaacaaaaaccaaacagcatggaagccagtagaaaatcaatgtagacctgtaaaaaagtaaaagtattaagtaattgaaactatagctaaagtagtcatggaaactgtgcatgtagaaaagcccaggataggatggctttactggtgaattttaccacccggttaaagaattcacagtgatagttctcaaggttttccagaaaacaggatacaagtgggtgctgttcacataatcttacctgtcagtctaatgttgccaccaaatcagataaaagcacttcaaggaaagacaattataaaactataaagaacatccttaataactatatatacatactcaacaaaatttaacccacagaatcaagtcacctacagtaaagattatattcatgactaagttataaaaaagattagacactataaccaagtgagatttatctcaggaatatggcggttgcaaaagcctctgccaaaactctcctcatgatcagaaacaaaaagaacaacaaacagtaagtttactaggaatgggggcaactcattcagaaagggtcacttgtgtgtccctggactcgatgtcctctttaaagaggacaatcttaatgcttcctcccaagcagggttaggataaaggtgaccatcagttcttccaagtatgacatttagaagttcgattgagttcatttaaacaagacaacaaagtagaaggcagaaaatgataaaggaagaagtgatacatacaatccacacctcactgtgtgtaaaagaaacgtgaaaacaccctataaaaacaaatagaactattgagtaggttcaggaaattgtcagaatctcatggcattatgaaaaagtaccaaaacagtatttcaacataagggcaataaataattcagaaaatgaaattctgaaactctatttaccgtaacatcaaagagaacaagataggaataactttcaaagtaactattaaacttgtgctctggaaagtctgaatcattactgacaggtattagaagacccaattatattgaaggcacttgtggctacacttgggaagacttaatatttaaagaaggtgacggtaagatagactgtaaagtcacctgggagatgggcatctgggcatccttggatacatgggcctttgaggatccatctagtgtggctggcacaggcttcaggattggatcctgatctttatagatgaagagaggagcatgcacacctccctgcacactgccccctgctccctcctcccctcccccatgctttccagttgtgaatatgatgtgagcagctgcctcaagctcctgttgtctgacttccctgccctggtggactttactcttgaattgtaaggcatcataaacccttagctctgctcttgttagggaattttatcactgagacaggaaaagcaactataacagatggtaacgcctctcaaatttaccaacaggctcagcacaaccattatcaaaataagactagctgtattctttatagaacatgaaaacttgaatcctacaattcaaaggacatgtaagggacccagaagagccaaaatatcatttaaaatgaaaaaaaaaatcacagaactcccgagtgctgggattaaaggcgtgtgccaccaatgcctggctcattttaacttttactacaaggcaggtgtggttgtgcatatctgcatttccagcaactgagatgcggaggcaggaggattcttgcgggtttgaggccaggctgggatgcatagtggggtacaagccagtctaaactacgaatgatgcctggtcttaatcaaaaccaaacaaacccccacagaacccttcacaaagcagaatagaaattggacaatttaaacttaggatcaagattttaccctacaatcaatttccaactagaatgataagacagtttaatgaaggaaatatttttgtcaacaaatagcaacactataattatataacaacatggagaaaatgaaattggaacctgcctcatacacacacaaaattaatttcacaagtagatcaacaagtttgaaacagtgttgggaaggcctgctggtcagaggttggagtctaccatagcctggcagctttctttaaactcggcacaacacggaggcctccttccccttccccagtgagtcttcctgctctttacctgcccttatctagagaatgtctctgggcctggaggactgaccttatctgaaagctgtccctaagcctggatactgatttgtctttagcttgacccttggcacagtttcctgctagaaacttgctgcacatatggtaactaagacttgtactaggagctttactataggatactgctgccactttggaagcctgatgatataggagtgtaccacttaatgcaaattagggtctgtccccaagctcccaaatcctatgtacttcctatactctggaatgaagctgagctgattccctgaagtcaaacacagagggctgtctctatcacacccacacccatctgaaccctgctccctgcttttgctccctccaccctcatggatcaatgcagccaacaatcccaagggagaagaagaacaacagagcagcaaagaccctgtctcctctctcctgcggcctacccaccccatagccactgagctctctgactacctagggaatgggctttgagcccctgtgtgaaggaaaaccacagacccagcagggaaaactctgatatgagcaagaaataacctggagtgttgtcaaaccacttaaagttcggtgttagaaaaacactgttcagtttcctcctttatgctccatgtagtgggagatggaaggcaacacggggcaaaagcaggtgaaagctccgggacgataacactgcaccaaggcaatgtgtccctctcctctgtgcctgtgctacagacttacagggatggccccatgaggcaccgagcatctggataggagtgttgttgctctggaaatcctacctaaacctctcttgtggggatcagtctgatagtgtgacgataccagacatccaagactcatagaaacaaaataaaaatatcacacacacacacacacacacacacacacacacacacacacacacaccaagaaagggacacagttgttacttctgccttcaattacaattcttcagggatgacatcaggaagctggatgagaggactcagtagggggttggagctcatagatgagcaaccttgaagctaggagcactgctcaaagccagtgcagccagtgaggagactcagcaagaagctgaagacctaagaatggaggcagataggggatgcaggtggatcctagaatccaggcccgcgatggatctctggtgttcaggggcaggaggagaggagtattcctggagagaagagggagggagggagaggtagaaaaaggggggaagagaaggaggggacaggagagccattgatcaggtgcaggctaggctcccaggcgtcttcctcactcacgtgtgaatcttctttggaaacaaactcacagagcatccagcagcccctttcccagggcttctgctattccctaatctagtcaagctcacacctaaaattaactaccacaggggagaatgattaacagagaaatttgcctcgggactagatggggcaggcagggtcactagagattaccttctggacagacactagtgacttcctaacccatcttgtttattttactgtggagctggtggtagatgcttcccaatcacagaacatcacagcctacctgggctccttgacagctgccccgtcctccgctcccatgtctcttcctaatcatgcagggttcattcagcagaaaagagttccacagtgggcagacatggccagatatgggggagtcagtgttctggaggcccacccagccagggcagatgtggtctgtacccctgcagcacaacactgagaaataccccatgtcttcttggagtatccccagcagaataaagtcccaactgctctgctcagtaatcctgcttgcctgcacggtttcctgaattcttcctgcctcagtttctccaacacccacctgtgatcctggagggctactcgaggaaactgtccaagcccttccctggagcctgccctggggaaacacgcacgaagaagacaaaactcttctatagttggtttttcttttactctagccccacattgggtgacaaatgtttttcacccaattcagtgactgtcccttaagcaactgctgtcctgatcagcaactgccactcagctgttacgagcacagccggtgggaattctgttccctcatgcaccagctctctcaaagccactgagggaaactatctagatctctacccctctataaaactcaggaattaaaggttgagatgaaattctgctaactcagagaggctgatttgcaagtagctaacctctccctgctagaatctcccaaaaaacccacatcttctgttccactcccacttaagaacacttgctacacctggttcctccctacctagttgctgactcaacctcctgacgacaggttaattttatttaatcaaacaaatggaacatgtttttgcattataaacaaaagcagtaggaagaaatgtaacacactttaaaataatattccacaacactcttccccatgaccctccttaccagttctcaagtcccctttggctttaaagtccagcagtcactcaaagtggccagctctgagccagttccactgttacccagagcagagatactgatgacaagctttaagtcattctgatgttagcacttctaatcccctaaggctaaaactgtctgttcctctatgagtcactttccactaaagcctagactaaccagaaactgagagcttgcttctctgacactttgactttaataactcaaatcaggggtgaaggtattttatgcaaataaacacatcctagctatcttctgagtatcatttgatatgtctatcttatcaagacatgatttatatcacacataatatatatatatatatatatatatatatatataggagtgttgttgctcctccccccagttctaacttccactgttgctgtgactctctctggactctgtgaacgtgccttggccctgagccactgcaaataacacccctacttccagaaatgtctgcccctttgtctcttccttcctcccctccatgcctttccttccaacagtttaacctctatcccatgtagctactgcttcttctgggaaggtttctctgataacctcaggctacactagcttattttctgcctatcctcaatactctgttcatgccccttgccatggatattgactctgagggtttcctggacattagccgtggatcagatattttattgttattgttaatttttttctaagtggatggtgggaatggaaacctattttgtctaacagagcaaaggcagtatataaaacaagtagcatggttggtaactactggtgaaaactcaatcacatttttttccctacacattcatttaactcaactccataatggccactggatattagattttctagatgcaagtctgtgattccagcactctggagaacaaatgtcagaagattgatagtttgatatcagttaggctaaatttaagaccctgctcaaaacaaagcaaaacaacaatgacaacaaaaccatgaaccgtccgtgcttggatattctttgagtgtggttagttgtttgcttggctggttattaatctcctaggagacaaaccagtatatctcattcactctctgccagctaggatttgaacagccttatttggtcacaaggaataaagtgcacacagggttaagactctgcctgtggagtcataagtgtttgggttgagttctgacataggatttaccagccatgtgacctcaagcaataaataatgcccccaattcctagcagaatgcctgctgcacagtaagagcccagcagttggtagcaatggcgattaatgttatattctgtacaaaagtaatattcatttcattatttccctttaatcttgctgtcagaggctgattaaggcatcaccaggggctttgtacactgtgtgcaggaaaagcagtcaagaatgaccagtcccatgcgattatgaaaggaaacactgctgctttccactggacagacgagaaaacccacactgggcagggttgggtgacctgcttctggtcacgtcgtcgccaaccaaggcagagctgaagctcaaagcagatcttctgactccaacgctggctctcttcacgacactgtacaccctctgggtgttatcgtttctgggtcccatggggcttccagctatttaagatcaaataggatttgggaggctaaaggtgcatcctgggacagtctgtcctctctgtccattcataggctacagggatctttaaccgaggggcgtgctgttcatgcttcagcccagtcacttgtgactcccttccctcggatcagctcccacagaggtgagtgtgccttttcacagagtggctcctcctacaggactggactgggaatgccatcagcaccttgcactccaaaagttcatagaggtttatgttcagtgggtgcttatcatgaaaaatgaacataaccctggagtggacattacggagttctggatctcattgtaaattgccttgctcgataagaactgaggacctgtctcaagctttccttctcagaggtgtggacattgggctggtcacatgatttctgaggagccagttcactggcagggaaacagaagcttaatggactctaaaggcctttgtctctatggagatgagtgggccagtcctgatttgggtaggaagagggccccactcctgctgtgaaatatccagggtactagtaatgctctaccatccctcgcctggcctaggagcccacacaaagccatgccccctccatgctgggactgtgacagggttgatctggtgcaggtaaccgtagctgctgtgacttcatgagtgcaatggccatatcatgtctagaagattgtttcacaacactcctctccatcctcgaacttagaactctgtcggacatcaccactgtaaattatcgtgctgtctgaacatttaagtaattaagtattattatttcaatatctctggccagtgaatgttttttcaacctgctagggaaatctcaaaggaaccaagtttcattgaccagttcttggatattatgatattttctaatcctataggatctgatgtctcacaactttcccggggctttggaactagaatttgttccaatcagacatggggcatattgaacaaactctgtgctcccactcctcagtcaactccccacaatatggcagggccttgctacagggccacagagatctgtccagagtagaaagccttttggcagatgatgggaagctgaaaataaatctgaggggaaggcatcttctgagcatgccaagttccgtctgtctggtctaaggcagggttcagtgtttcttctccagcctccgttgtcatctttggtacccaatgcctagaagagactacacaaacaaacaagataaatgaactgaatgaaagaacacagagtatctgatgtaacaagtaaatgaacattctttctaggctagagaatggctgccaagaaaccttgataacacctgcacaaatttgcatggattacaggacagagaaaaaaggcataacacaaagttgcattttctttattcttttcaggaagtcttgcaaaacaaacaaacaaaaaacactgtgaattattttgttctctgaacatttaaaataatttaaggtgttattattttcatttctggctagagtaaagtttctgatgaattcccttccaccctctgtggtgtctgatcttccttgtctgcctaccacctggccttgccatagctaagctcattaacacactggtagccaggaggccaatggaagcaagagaaccaatgtaaaacaaagagggctctagagacagccaagcctgtagttctgattcctgggcccaccatctatcagagagactgtgtaccaagtacctagcctctggagtatagtgagcttgcctgtgcgtatgattatgagtaattttgtaaggagagtgtaccttgaatcctgcttattcaagtcaatacacaatccattttagttattgtcttcatgttatgttatatataacctcatataacatcatgtcatgtcatatcacccagacttgatatataagattacagagcaatttacatatagtagtattgtccatagaccgtcatgcaatgattgattgtacattatctaatctttgcctgtggtgttttggccaaagtcatgttcctctgagtcagacctgaccttttggttttttttctcctgtgcacactgaaagtacaacccaatgctatacttgttcttcacctacacagtgttcagcctgttgtagttggcctccttcccattcaggggagaccctctgagttccagatctgtctgtgagctttccctgaaagactatgagtctaatctgtggacctgactgcccccttcctccacagcacctctaactctcactcatctctgcattctgtttgaaattatgcaagtttagggtattacagcttaaggatgggccggagctagtgtgaaagtatgttttcctcactgctctgaggtgatcaagcccaggacagcatcagggaaaggatggggttttctagcagtctaaggcactggccttactctggggaaggaaggaatatggaaccatggcagggaaaatatggtatagggacataattctgggcttagtcctggagcaaatacggttgattgacacatcccctttctaccccctcctctaggttgtagaatccccagagacacaccctcaagaaagatggagcccttcttttggcatgatagaatggaacagaattgccttatgtcacatacagaaaccccatctcccttttatgagactgattcaggaaagggggtgatcccagttgatcattaagaccacaggagcagtcggagggtatattcttagatgtccttgcttcctgttagcaaaagtgatgctaagctctttctcccggacgtagatattattgcttgagagtaggattcttggagctacagcaccacataatcagacaagccaaagggccaggggtataataggggtggtgagaagccttgtattcaaaacaatataggaaaatctgattctggacttctcatggtttgtgatccaattaaacatgtctgttgctttaaccactgtgtctttcatgttaattgtcactggaggcattgtgtcatcggacacaatccgatttgtgctgtaatttattgttggtgtacctgtggattctattagaatgatttctgtattcctagcattgagcaatctcagcatttagtaagacttccagaaagaaatgaaaaacttgttcagaaataaaaacctctgaaattgccaaaacatgaaaatcaggatgtacattctgcttgagttctgattgtatcactaccaggctacagttcagttctgtctatgacaaaaggatgactgaaaaacactaaggggtgtgatactacataataagaatatgtaccattatctgccgataagtaaataatgactggtataatgatccctgagaacgcccagaagttatcagcatctacatggagatcaatgttcctgaattaaatcatgcaagcaaccatggaatatttaaagtacttttgtactttaaatacagaggtgcatgcatttaaacatttcacagatatttttttaaatatcttccacctaccaggtacttcccaatgctgtagggaagagagatgggcagccatgaggcctctgtccagtgaagactctcagttctcaaacaggatgaatagcccacacaaaaacatctacatgcctcaggccctgtcctgttagcagagtgtgacactgccactgtgttaactaagaaaaccaaaattcttagctagctatctatatgaaatgatatccacgaaaatttcccctgttcggtcttcattgcctgagtttgtttgggcgggctactttctgctattattgcctttggttcccaacattcacacctgcttcccagactatgggttcacccagaatagctacctcagggggaaagcaagtttgaaaactggtggagttaggggtacttttttctatgtaggaaggtgttaagtagagtcatgctttgctataaatgaggaaatacaaatcaaatacaaactaggccctcattcaccttctttctgactgacttctgaaggagaccagaaatcctgaactcatcaacatcattaacaaaccagcctcaaggccaccactcagttcccatggaatgcaagtgcccaaagacagcactttgtgctcttaatttggctggcagcctacccaaagcaaacattgctgaacctggtcttgcagtttctttcagataatgtgagcttccttctgtttcctacacctcttctttacatactgagacacttacacacttggaccctgccttcagcaggtggctccagccggattttttcttctttgagcagcctagatgccaaggcctaactgggccagtttttccacttacagatgtgagatgcacccgaagatcagtgcctatgtcttggtttgtacacatggaagatggaatctaagcacctttccttcctgaccacggacttccagtttaatcagttttcctcattgagctcctctgagctgacctcctatgatcactgcacacacagactcgtgttgtgaacccacagcatgcccacatggtatttaagactcagtctgcatcttggttcatgcactctgtgacagttatgagactgtgatcttgttatcttttcccttctctgtacatttgttgtgattttatattaaacccaccgagctggacaaggcttactttctcactctggtatcttttttctttctctataggtcaaagtgttacagggaacccacaagagatgatcactcagtcacaatttatagccaactgaaagtctttattcctgctgcctgggactatgttttttgggacctaagtgtatccctgagcatttagagcaaggggctcttaaaggttaaaaaacatattctggtagcttgctctataacagaagctaagctaagttaggctagggcatcttgacctcaggttcttagaatacagttggatgagttttctataggagtcaaggagttcaaattctagttaaacctgaaatggtctcagcatgaatggtggcggaccctttgaaaggttcaggcattatgctggcctgcccctgttacctggtgaaacaggcagtaccctggtcagcccaaggttccatgggaactaagtctgcacacaggtacagaggacccctttaaaagataagtccctgcccctttacgctctctgtctttctgttcgctctgtcccgctctctgtttctctatctctctgtttctctgttcccgctctctctgtttccctctctgtctctctatggcgactggccatggcggtcagccatttaccctgttcctcttcttagtctctccattctgccgggccttataataaacttatagtcttatgtctcatgtctcagtatttctcttttcttctttttaaacaaaacaataacaccctttgcattgtcttgccctgtcacaaaatgagtacccatgtatatgtatttattttagaaataaaaatcaaaacagtgtgagaataaagttaaaaggcagtcatgtccatagtacccacattgccatgtttgatatgtagtgtgtatccatttttaaaataataatggaataatttgttgatgttttataaccttttccaatacagcctatttgtagtcctagcatgctgtttttttaaaggtgtccttatatttctcgaaatggggaaggcacaattattttaccagcctctattgggaaagatatacatggctccagtatttagcaatgccactgtggagagctttggtactaaatcattacgtctcacaggagatccactcaacttaaatttccatttttcacagcactcctcctggccttgtttggatttcctggtctttgagggaatttggaattgctttattatgcactacttcctctgaacgcctcctctggataatgtacacttcactgaaacaaattgtgagccttttacacagataacatgaaaggcagcaagattgctgtcggctggggtgggtgggcacagggaaccagccctcatccacagacccgctgggcactgggttcctcagaagccctgttgtgactcagtgctgtttgcttctggtgttatttgctgtgtttctttggtgctaatgacagcaaattgctaatggctgtgaaaagctaattgttttgcaaggtgtttctctctgtcctgattatcagggtccacacagtcacagttaagcagactcattagcgcctctgacacagtgctcttggggaatcctcacaggttggcaaatcaccaagcctgcactgacccagagccaggaggcttgtgccctggccggtcgtgccctagttggtcggcaaatcaaatagagaggagtttcggaagcagttcccaggagaaaacaaaggaagcagatacgctgtgctgcacttcggactttggacggagagcctgagcagcagaaagccttctcttagcaggcaagtctcctaaaatgataccagtgtcttagctggaccaagctggcactgtgcacggggcttcatggctgtttctcttctgaggggaataatgagccacaaagagtgaatgattttccccaaactctttcactcctgggaccagtgcctaaatttcttgtttgcttgatttgtttttgttgtcaagacagcatctcactatgtagctcaggcaggcagctaagacaccatgtagcccaggctggaccagcttcctgaggatggaatgactggtatctatcaccattcaaggtctagagactggactctaagtcactactgagtaacacttcttggaaactcatgggccagcgtgggcacacattgattagaggagaaaatatcagaagactagctttagttcattatagtacatgattatctcacgaaagttgggctggttagaaagcagagaaacaacaaagaagcccacgctccttgcactagttgacgaatattcctttctgacgaattcctgtctggaaggcacaatgtctccactgaagtcctgtattctagacaccctgtgttaaaacagcaagtatgaggttgtctgtcattgatctgtcctttgacttgagtgcagcaatgggtttcttagctaaaatgaaggacagtactgcttctgtggcctatacttctagacgtgttgtggagtatttgcaagggctcattagaattgtgcagctggagagaaagcatgtcagacctcctcctgcccccagtttctcaaatgcatctctccgtttctggcttccttttcccaggcaatgcaatcacttactgcttcttcctactagtaatttcatttgcaaaattatgcttctaattcttgcaacttttgcaaaagaaatagaatcgaaagctatagaaattaattgagatgctaagcctggtgcctgggattgccaggatctggttagctggagttcattttacacattctttgagaaaacaaaggaaaggggcccatccattgggagggcagcctgctaaagcagggtagagaaaacaacattgaaaagcaaagcaccccaccatgtacagttaaaggacaggttgcctcagcaaccagagactgggggtggggaggatgaagaagtggcctcacctgccatcttccccgtccttttctcctgcctcattagcttagcagagatagcaggtgcctttattggcttggctattaacagggcaaagaactggcattaaagttaatgttaaactctcaaccaattccattgattcaataatgagatttggtgtgagcagaacgaagcagggacagaagagtctgaattccccacttgtcaggaagtggtgagtgttgactgaggctgacaaatgactcctggcataattattccaggcagatgatctggtgtgataagggagcttgatacacacgattggccccagagaagcacagagagccaagggaggcttcccgattataaaaaaaaatgctgccttccaaggctagtcctgctcacttcttttgggtctcagggttaagctctgccattcctgttagtcacaaacaaattaagtcagtaacagcaacacatcttgcttgagtttgaagacaagccaatgacacacatagtttccagaagaccctctcccaggactccctatagcaggagcgtgtgggagagagccaatgacttatcagtcacctactacaccacccctttttacagtttctgcagccaacagctgcaccctccttaacagtctgcatttctctcttttccggtctgttgtgttctttcctagttggagatgctacctgtttttgtttgaattacttactggaatagacaagtaaaggtctctttgtccttagactcatcaccctctctgctacagcatgcttaaaaaaaaaaaaagtttgatcatgttatttatttgttaaaaatatttggctcttctccaaagcattgaggctgaaattgaaagtctttctgtagagtggcaaaatgaaaatgtcaacagactttttataagtctttttctagaagggtgtagaagaccccagaccacaggtaactgcttctttattatcttcttgcggcaatagaagagagtgggccttctggaacacaaactatgtggctagacagaaagatcaggtccctaaggccaaagcttggcctggaagcttccatctgggtcatgttgtaaggtgaactgaagttttatcctctaaaattcatatgtccaaattgtgatgcctggtgtgatggaattaggaggagggactctttaaggaatagtattagatcatggtgtagggcccttgggagtaaaggcttttattaaaggggtcacaggtagccttctagccttcctgcatgtgagcttatgctgagaagtgggaagggtgtcctccttcatatagacatctgtttttgaaccttcagtttcatggaactgagagaaatagtttgtggttcataaggcagacagtgtattttgttcaacagccaggcctgagcaaagctcctaataaaatattgaatttccagttaaccttcagtttcaggaaacaatgactaacttttgagattgtattttatgtaacatttatgggtctgaagtccaacttttactaggtatcctgtatctttttatctgccaaatatgataacctcataccagtatggggtggaaggtgaggctgaggacagtgaccaaggaggagaaatctgagctccagcaaaaggactgccagttaaatgtgacagataacaaaggtccacttagctccatctagaaaaacctccagaataaaagagaaatgacaacaatggcaaaaatatggcatgaagaaaatgggactaatacctgatagtaggtaacagatttcaaaacattttggatcatagaaaataacatataaatgggaactaattagcatagtgctggtaggggtgttgacaagaagagacacctattaagcagactctagaaaggcagctgggggtgacaaagtaacaaaataatgcagccacactaagatggcaaatgccactcaactatacatttcaaatagttaaggtggtgaattaagcagtaaatattttaccacaactgatagtgtaagaaaacaaactgaagtagatagtcacccacaccagagacaaagacagaaggctaaaacctcctggggaaggaagaggtctcagatcaagaattagacacagctctgactcaagccacggggaacagttgggaaatcccttcacagttctgtgggaaaaatacttccagacaagaactttatctcatggcaagctatcaaggatatcacctgcaagtgtagattgaagacatgaaggcaggattagtgtcccaggaggatatgccaaggcaatagaaggccaaacaaagctggctacctcagcttggccttgctatcactgcttcaacccttgagtccctagccccagatacattacacttggacacttaaggtctcaagtgttacaagtacagcggtccttgctctcacaggtaagcactagggataccagaaatgctaacatgtggagttgtctctttaatggaagagatttataacctgttttctcccagaagcctgagaatggaggtggctaatagccttaagtgatccttgttttatctgtatgaccagggactcccccaagctcccacaactaggatttgaggtggccaatagtctaggtgacttctgtgctatcctgtatgaccaagaccataccagattctccccctaggcccttaagataacacaggtagcccatctttagaatccatccttatggaagaagcaccatgtactttgagaagagttttgatgtgattatgcttccttgtatacaggggattgtgttatagtagaaaacttttctccaaattgtactgtacctcaatatgcctaaaataaacagcctggcatcagactctagaagtttgaaccaacattagctactgagatgtgttgaaccagatttccttcttgccttcatggattgttactctgcttttcatagatgtccgcattcaagaatccctgcctcataacatcactgctcaccagctaatagaattggctatcataccttctacccagtgaatagaccaaggttcattaccatttataccatcccatttcatccgtcaacttatcccttttttttttttctgatgtctgatggggaatccaagtctcaggtaggaatctgttgggcagataaacataaaggccttcagaaaccaataatgttactgagaattgtagctatagaaagggaaaggtctccacattgagactggatgtgtgtgtgtgtgtgtgtgtgtgtgtgttgggagggagggggagttcatttttaatttctcccaagaagcagaatgcattcattcattcagttgaagcattttgtgtactatgtttacactctactagaattatgtggactattagataatggcttctgctatctaattccattaactttacttttttaaggaaaaatttgtgtaataaatcaatattaaaacagctttattccaggcagtggtggcacatggctttaatcacagcgtttgggaagcagagacaggcgaatctctgtgagtttgaggtcagactggtctacagagtgtgttccaggacaggctccaaagctataaaaaaaaagtcctgtcttgaaaaaccaaaagaaaaataaaagaaaagaagaagaagaagaggaagaggaagaagaggaagaggaggaagaggaagaagaagaagaggaagaagaagaggaagaagaagaagaagaggaagaagaagaagaggaagaagaagaagaggaagaagaagaggaaggggaagaagaggaaggggaagaagaagaggaaggggaagaagaagaggaaggggaagaagaagaggaaggggaagaagaagaggaagaagaagaagaggaggaggaagaagaggaggaggaagaagaggaggaggaagaagaggaggaggaagaagaggaggaggaagaagaggaggaggaggaggaggaagaggaggaggaagaggaggaggaagaggaggaggaagaggaggaggaagaggaggaggaagaagaagaagaggaagaagaagaagaggaagaagaagaagaggaagaagaagaagaggaagaagaagaagaggaagaagaagaagaggaagaagaagaagaggaagaagaagaagaagaagaagaagaagaagaagaagaaagaagaagaagaagaagaagaagaagaaaagaccaaatgatgggagatgtcattctgtaaatatgtttgtcttcttggttgatgaataaaacactgtggccaatagggcagcaagataggtgggtctaggagatgggagatgaggagaattctgggagatgtaagcagagatcagttgccgtgcaggacactagaggagtaacaggtccccggacctttctccagtaggataggaccatgttagaaatacatagattggtagttatgggttaataattaagacagagctagccaataagaagcccaaccaatggccaacagtattataattaatataagtctctgagtattcatttggggctgacacaactgtgggacctggctgccaggaaagagttatcgtacaaaatggtgccagcaaagtgaagcacagatttccacgtaaacctgacaaaagcttaaaagcagattttagaaacaaacaaacaaacaaacaaaaaaaaacagagacaagcatggcttcttggtagcaacattttttttttgggtgggctgtgttttgctagagacaagcagagacttgagcagctcctttaagggaggttttctgactcagcatagcaacaaaaaaccacagggttcttttaagaggtgctgctaccaaacaaaaatattgtgtatgagaagctggttgcagcagtgacctgcatgctgcatggcagatttagcttttactcataaagtttatgagtcaaggcagtgagtacatatgtactcccagtgctggtgataaacttatgcctgccatgttggaaagccagcagctaaaacatcctctttaatcctagcaatgctgtttagcagatcaaccactcaagtggttagaaaaagatagagatatacagtaaagacagattaagatgaagaaaaacctctaaaggatttacagtgtgtttaaaaatatacaaatatacgttggcttttgagagaaaagaaacaggataaggtggttaaaaagaaaagagagagagagagggagagagagagagagagagagagagagagagtagttgtagtggtggtggcacatgcctttaatcctggcactcaggaggcagaggcaaacagatctctgtgatttcaaggccagcctggtgtacaggacaggcaaagatacacagagaaaccctgtctcagaaaatgaaaaaataaaagtaaaagaaatagatttaaaaaaaatagaaaagccatttaacaatggaaaatacatggagagtctggatatttatgttatagtgttgtctttaaattttttgattgctgaggaaagagctacagctactaaaatacacttgattataaatgctgctggattaatccagcttatatattttgaaaatgctttgacttcaaaatttaagtctaaggacaggttattttggaaaagaatttatgctttttgtttccacagaaaatgaaaagctgtggattctttccagactaatatggcttgataaaacaagccccctgaagcaatggcccaggtgatccaatatctaaaacagctgagatgatgcagccttacagactactacaaggacttggacaggtttctgtgttttctaaggatccccatggtatttcagcgcccccaaacaacaggaagcagtttagagagaatgatgcccatattcccaaatattgtttataaatgtttttcatttaaatggggttggttataaattgttaatgctcacaaccaatctctttaaaggaaaaaaggagattatgatgtagaaatgaatattttgtattggtatggattttcatttattgatgcaaatttaaggtcagttttgttatatgtacatttctcctcttgtttagatattgtgtttatatagctcatttaaaaatgtaatgtttaattaagtacagattatagatagttatctataatagtcaaaacttacagttaggttagttaggttttctaaatatagagagagatatttcaaatggataggcattcttcaaacctttcaaagtcctacagaatatgacatttaaaatggtttagggtttttcatgacagtgagacacaactgctcctggcaacaccaattatttcagagaggaaataattgaaattcgttatggagtttgcctttgacatggcagaaatagacatttgggcaagaaactactcttgcctggactgtttgactgtatgctgtgtaaactgggcatgcaggacccacaggaaagtgacttctgaacttgcaaaacaaaatggccagtctcagggttcctgcttcatggaagagtctgccagacattttataggacacagaaaaatgactgacaaaatgccaatacaggcgaacagtttaaaatctcctgctttgcggagaagtctgttagacacactatgacctatgggctgaagatggatgccccaacattataaaagaactttgggtgactgtccaggtagcaagatgtctttgtcaattctagagtttatatattgtccttctgtggtctttgatggagttgaaaacaaatagttatggttatacttttccttaggataaaagataaattacatgtaagattttagactcacaatgatagaatagatgatggaatattttctttaaatctttctaaatgttaataaactaaatattgtaactatagttcttacttgataactgttttgttatatataatttgactatgttaaagttaaaacctttctttttatttaaacataaacgaggagatgatagatgtcattctgtaaatatgtttatcatcttggtagatgaataaaacattgtggccaatagagcagaaagataggtgggtctaggagatgaggagaattctgggaggtgtaggcagagagcagtcgccattttggacaccagaggaataacagagccctggacctttctccagtagataagaccatgtagaaatatatagattagtagttataggttaataatcaaggcagagctagccaataagaagcccaaggtaatagtcagccttattgtaattaatataagtctctgagtgttcatttgaggctgacgcagctgtggaaccaggctagtgggaaagagctatcattacaaacaaaataaaacaaacaaacaaacaaaaatccagctttacaataaaacacattgagcgcatataaagggtacccataaattcaaacacatttttaaaaggtaaaatatattttttattttagtttagtttataaaagttttcatataatttaaatcatatttaatcgtactctttcccctccttcagatactctcaggtcctccaatcatccctgtccccaccccaacttcatgatttctctttctctcaaaacaaagcaaataaactaaacaacaacaataataaaacaagaaatactaagacaaaacaaaaatcatacaaaaaacatagagtccgcttttgtttgtagcgtaatatatctagtttggatactgtctgccccattatatggtgactccatttaaattccttttatgtatatatgtgttttaggaagcttctacaatagtaggtttccataagatttttcaaaaggcctttagtgttagttgaccttcctcatatcccctcctttaccctgctctcccataccactcccaatttaatctccctattctagttttcagtttatctctttttagcattagactctatttccctttgcttggaggctcccctcctcactcctgtttccttactaggacctgacctctgtggttgctcagattgaaacacacatatctaaagcttagaagctaacatccacatacaagagaaaacatgcaatacaatacatcttcactagcccctgatatcagttaccttattaatctcggccattctaactgggataagataaaatctcaaataatttttgcttgcatttccctatggctaaggatattgagtatctttaaaagtgtttctcagtcatttgcgtttcatcttttgagaactctgagtttcttcctatacccattttttaaattgggttatttgttttcttgatttttgggcttttttagttctttatatattataatttcaaatactagtcctctatcagatatggaattggtaaagatttttttcccatcctgtaggctgctgctttgacccaatgatggtgtcctttgttgtgtagaagcttttcagtttcatgaggctaattgtttgctagttgttgttcttagtgcctgtgctgtcactgtcctgttcagaaagtcctttcttgtgccaatgagttcttgtgccagtgagtctggtcttatggtgaggtgcttggtcaatttggagttgagttttgtgccaggtgatatatacggatctattttcatttgcctatgtgcagctatccagttggaccagcaccatttatggaagatgctttcatttctccagtgtgtattttagacttctttttaaaactcagatgtctttagatgtatgggattatgtttggattttaaactcaattcctttgatcaatgtatttgtttcttataccaataccatgctgtttttacagctctgtaatacaacttgaaatctggaataatgatacttcccacagttcttttattgctcaagaatgttttagctatcctgagagtgagtgtgtgtgtgtgtgtgtgtgtgtgtgtgtgtgtgtgtgtgtgtgtgtgtgattccatatgaagttttacattgtttcttcaatttctgtgaagaattgtgatggagattgcatggagtctgtagattgctttaggaaggatggctattttcaatatattaaccctacaaatctgtgagtgtgagagatttttccatcatccattgttgtcttcaagttcttaaagtttttattatacaagtctttcacttgcttgtttagagatagcccaagaaagtgaaagctttgaggctgtttgggggctctttgatagcaattgttccctgatttctttctcagggtgtttttcatttccaaatacttctttctttattttattgtgtgtggggagagggcatgtatatatgccatggttcacatgtgggaggtaaaggccagtttgatctcaggaatcaattttaggtggtcagccttggccaaagttacctttcccagctgagccatcaccagcgctcactcaaatcccttttggttagccacatcacaccccagagtctacggatgacctcatgccatgggccatagtcaagtacaactgcactaaaattactgtgcgcaagtatctccaggctctgtgtatgaaatgaacatgaaatgtgggaatttcctgtaggtatgagagatgtcacaaacaggttatcaagtgttgagagtggaattttgtacaatgagctcagaaatacgactggagtaaccagagaaggcttcacaaaggaggcagcatttgcattgcctttgtaacatagaaggttcaggataataaaaacaactggaatcctagccagaggagaaagagcaaagctgagactcagtcaaactagttggggccgagcataccaggcataccagagagctggatgttataaagggaagctgtatgtgaagtcttcccaaaactccagctcctccctaattatatccttacagaggcagcagctcctccagacacattccaaaagaccctgttcacacctttgatagttcctgtcacagagggtgatggtgacctaatttgggaatactttctctgtcatccccagaaatacaaagacccggtgctgtgatatctgttatctatctatctatctatctatctatctatctatctatctatcttctatttttgcccttcagttcatactgctcagagtatgaggcctcctgcacctagctgagccccaactcgttgagtatcaattttacatcttttcccctggttgaaagatttcagttatttttttttaattattctgaatcttatgtgttaaaaaggcaactctggttactccattcctatttctgagcaaatactggccatagatgcagtgaaggaccaggatgaacttggtgaagattcagagagtgaagatgatgaggctgagacaggctcagtgcagagaggggtgtgcagtgtcctctgtgatctcttcctgactctatctccagtggtcaccagctctttcttcagcaccttagtgatgatttgtgcttttgccattcagaatcagcccagaactggagttcagaaaaatctgcaaacttttgtgcccttgtagttcttgactcttagaatcacactctgcttcgtcacatgctgcgcaactgaaaaaatagtccaataaaccaatctggtcctttggccccaaagagaagacccatctcctaatgtatctatatagctctatcatctgcctatctgtctataggtatcatctatgtctgtagttctcatatcacacacacacacactcattcaggattaggcttctataatgaatatggagaattttgctatcaattacacatctgccaattcccaatcactatcaatactatcaagtgttagaggctgcatgtctgctttatagtcacaaaacagtctcttgtgcttcactaggtgctctgactactcctgagaggtgacaggagccatataggagtgggtcaggtgaccgtgatcatcatgctgggaggatggagcaaaggtttccctgtctcttatctctttaattaccactggttgggtgtggtctacattcaggagtattcctagaagatatgccacaacatagggttttctttttaaaaacctcttaagagattatctcattacctgagttttcttataatttacccccacagctccaagcagtcacagctttgtgagccccatactgaaatggctctccagtctgggctttgtttcttctctgccccaccccagaatcatcctgctcattctctgggaataaagaaacatctggcacaccagtttatccttttattcattttctctcactgggggacagccttccacacataaactttttagaatgaatagtactctgggctcacctttttttcggtaattcactgagcagttagagaaataaagctaaaagaaattcttagaaaggcacaaagggaaaggaaacacgacatggtttctgcccttgagctacccatgaaagtcagcgggcacagattgggagatatgccatgctgtggaaggcttcgttcactgccttgcttcggttattcctaggtactttttccccattggcactatcataaatgggatatttttcccaatttctttctctgcaaatatgatattaacaaaatgtgaaagctactgatttttgcaacttgatgttataccttgcaacttgactgaaaatgaggcaggatcatttgatatttttaatagtgtcaatcttaattgtatgattattaaatgtatgacttattaacaatttctaaactatatataaatgaagcccaaagtagcagacctcacaccatgcccattagtacaggtaacacaaaagcaaattaactgggtgcatgaccgtaatcccagcacccagaggactgaggatagcctgggctacatagcaagactcagtttgaaacaaacaaaaataagaactaaaaccaaattatcaaacccaggacccttagactagaatgaatgtgctatgaaattgaacccttatgtctggagatagaactcaatgatagagaacttgtctagtgtgcccagcatcccgggggcatagctagggctacaaaaaccaagcaagacaacaacatcagcaaaacctttcctgatctagtcatgcacttcttatgggaatgcatatcatgtagccacaaggaaaacagtgaagcaggtcctcataaaagggatacataccataggacactgtccaggctaaaggaggagaggcctgatacacactatgacagacacacatctaagatcatttgctaggtaaaagaagccaggcagaaaagacaaacattgtgtgagttcatttgtaaaatcctagattaagtttatagacatggtatacagaatagaggttattaaagtcatggaggagaaatacagaagagttattatttaatagagagtttagttttgcaggatgaaagcattctagagattggctacacagtaatgggaatgtacttgctactaaatgctaaacaaataatagaatgaaaaatgttgtatttcgggcattttattaaaattagtttttaatggtcccccagagaaggggaaaaggacaagatctcctgagcaaattgggaggatgggggaggggagctaggagaatgagaaggggagaagaggagggatgaggaggacataaaggagcaggaaggttaagttgggggaagaatagaggagagcaagataggagatactataacagagggagacattttatgttaaagagaaatcaatcactagggaaatgtccagagatctacaaagatgatgccaactaacaatctgagcaacagaggagaggctgccttaaatgccctcccctgatactgagattgattactaacttacatgccatcctatagccttcatccagtagctgatggaagtagaagcagacacccacagctcaacactgaactgaactggaatccagttgcagagaaggaggactgatgagcaaaggggtccagactaggctgatgaaacccacagaaacagctgacctgaacaagggagagttcttggtccccatactgatagctgggaaaccagcaagggactgatctagaccccatgaatgtgggtgtcagtgaggagacttcagaaatctctggggccccttgtagtagatcagtacttatccctagcataggaatggactttgggagcccttcccacatagagggatactccctgagcctagacacatggggatgggcctaggccctgtcccataggatatgacagactctgaagacccctgtggaaggcatcaccctccctggggagcagaaagggtatgggatgggtagggtgttagttggaggggacaggggaggagaggagggagagggaactgggattgacatgtaaaacaatcttgtttctaattcaagttttaaaaagtaggaaaaaaagaatatcaaaattcaaaacataaaattactttttaaaaaaatttctaacagaaaaaactattcatgtatacaattctcaaacaattaataaaaatatgaaaatattatatttaaaaggaaacagaaaatgctatactctaatctttcttgtactaattatttctaccccataaattgcccccaagtttcgctgcttaagcagtcaagacttacagagtccatttcagttcagagtgaatcttggagaagactctgtcctcttgtctaagatatcttatctcaagattcactttgagaaaatctgtttccaatattgttgctgcagaattcagttccttgaagactcttaaatttagggtcttccttcctttctttttagttccctgccacaggcacccctccgtacttcctcttcccacatggctgctgacttatgccagaacaagagtgtaaaatatcagaagtaggcaggaaggtttttctagattaatctgggaaatggttcgccatgtttgctctattccatttcttaggtgcaagtcacttggtccaattcagttagagaaaaaaattcacagattggcaagaataacaggcaagaggaattactgaatatcagtagaagcttccagaatcatttatacataaatgatactgtaagaagaaagaattgattaggaattgacgtattcagatgcagaaatccacaaataaccaatgggccaagcttctggtgtacaattgaagtgaggaaggaatgataatatgaacaaaagagtcagaaccatgatggggaaacccacagaatcagctgacctgagctagtgagagatcactgactcaggtctgacaaatggggagcctgtgtaagactgaactagactctcttaccataggttgacaatggtgtgactgggacaatatatgaggccaatggcaacgagtctaactctaatgcacaaacagactttgtggagcccattctatatggagaaataccttgcccagcctagacaaagagctgtgggggtggagacgtgccttggtcctgcctcaaagagatgatgggacagacttagtagacttcctagggaagtcttacttctcttgccctctccgtggagcagatgggagggggagtgaggggagaggaaggagatgagggaggggggactgggataggaatgtaaaaaaaataaattaataaaaaatttcttcatgtgggcacttagtgctatgaactttcctcttagcactgctttcagagtgtcccataagtttgggtatgttgtgtctaccttctcattaaattctaggaagtctttaatttcttttattatttttttcctcaacccaggaatggtgtaattcggtgttattcaatttccatgagtttgtaggttttctgcaatttgtattgctgttgaattctagctttaaagcatggtgatctgataagatacagggggttatttcaattcttttgtatctgtggaggtttgctttgttgccaactatatggtcaattttagagaaggttccatgtggcactgagaatgtatactcttttgtgtttggatggaatgttctatagatgtctgttaaacccagttgggtcataacttctgttagatcctttgttcctttgttaagtttctgtctggtggtcctgtctaatggtgaaagtggggtgttgaagtctcctactataataagtgtgtgtggttttatgtgtggtttgagctttagaaatatttcttttacaaatgtgggtgcactcctccattgctggtaggagtgcaaacttgcaagaccactctggaaatcagtatggcggttgctcagaaaaatgggaatcagtctacctcaagatccatcaattcctctcttgggcatatacccaaataatgcacatccatacaacaaggacatatgttcaaccatgttcatagcagcattgtttgtaatagccagaacctggaagcaacctagatgcccctcaactgaagaatggatagagaaaatgtggtacatttatacaatggagtactactcagcagaaaaaagcaatggaatcttgaaattcacaggcaaatggatggaactagaagaaaccatcctgagtgaggtaacacagacacaaaaagacaaacatggtatgtactcactcatatatgaattttagacatagagcaaaggattagcagcctacaatcctcttcaccaaagaaactaggaaacagggaggactctaagggaaaaatgcatggaccccaggaataggaaggggcaggaattcctgagctaattgggagcatgaggggaggggagagagagctgccagaatgagaggaggagaagagaagaggagaggaggaaatggaggagcagaaatattgagttgggggaagaatagaggagagtaggatgagagataccatattagagggagccattataggtctgaggagagatctggcactagggagatttccagagacctacaaggatgacacgaactgacaatctaggcaatgatggagaggataacctaaatgccctttccctataatgagactaatgactacttttttatgccaccctagagccctcatccagtggctgatggaagcagaggcagacacccacagatattcactgaactgaactctggaacttagttgcagagaggaaggaatgaagattaaagggatcaaagggtaccaggctggtgaaacacacaaaaacagctgacctgaacaagggggagcacatggaccccagactgctatctgggagtccagtacaggagtgatccagacccctgaacatggatgtcaatgaggaggcctcctctctctagggggcccctggtaaggatcagtatttttccctggtgtaagaagggactttgagagcccatcccacatgaagggatgcactctcggcctggacacatagggagggcctgggcccagcccaggatgatgtggtggactttggggagccccccatcaagggccctaccgtgcctggggagtggagggtggatggggtgggggcgtacgttggggctaaaggtgaggggtgaggggaaggggatggagagggagaaggaattgacatgtgaaacaagcttgttcctaatttgaacaagtaaaaaaaaatacaaaaaaagaaaaaaattcatgactgattataggcataattgcaatgaaaaatccagtggaaataatgcaattaaactaaacttacttcaaaaaaaaaaaagaattgaggaagtatgaagagcaaagcttacaaatttaataccataaaacactggcccaactgctatacaatgcattgttttcaaacatacagggactatttgccaaagttaacatcaccctggccatgaagcaaattgtgatacattttaagcatttaaataacatattatgctaaggtaatggaaataatatagaaatcaatacaaaagataaactggatgtctgccaatgttttgcaactgaacaatgttcttctaaatattcgacagatcaaagaaaagtataatcagtgatgttagaaaatatttaactgattataattataattcaagtaggacacattcaaacttacagagaaaatctattttgacataatttcattgcaaaatgtttaaaacaaccccagatagcacgcagtaatgaaccttcagatattaaatatcaatatggcttaagtccagtaaatcagaaacaaagtaacatctaaatatgtctagggagtaagcatgatcccaggagtccagagcaaacaaaattcctgtaagaaaaacagctacttggcagctctagagtagaagtgagatgtcttctcctcataatacaactggcattttaatttgcacttcaaatgctgagaattttcaaaacacataattacactagaaaataccctttaagatgagaggaaaagctgttgggactacacccagtgaggaaggcaggagctaaagatggagactgcctcgagggcagttataaaatcagtgagcctcatgtccagtgttcccttattgagcttctgtctagacgatctgtccattatcaaaagtgggttattaaggtgccttagtgctactgcacagttagcctgtcactccttcccttaagatcacttagctttagctatagtttttttgtatttaggtgctctgatattgggtgtgtatgtttttatgactactttcctgttgagtgttctttatcactatgtaatggcctctttttattgcctttgatttaaagtctattttgtccaatatgagtgtagctgttcctgctttctttggttttcacttatatagaacatcactttctagccccctcccccccaacgcacatacattttgagttaataaatgtgcccttacattaatgaagcgagcctgttacaggcagcatagtttgaccttattcttttttccttacgtctttcattcactctttgtcttttagctagaattaattcagctatgtgcagggtgaccattaagaggttaggactatctgccgttgctttgaatcttgttttctgattgttctgtagacctctgacccttcctcatgctgtctttgtgatttatttggcttacacttccacatcatagtcaacattgaaggaagtcaggacaggaactcaaacagggcaggaccctggaagcaggagctgaggcagaggccatgaagaggtgctgtttatggccttcctcacaggcttgctcagcctgctttcttataaacccaggacaaccagcctagggtcagtgctacccacaatggactaggccctcccacaccaatcactaattgagaaaatgtcaggcaggcctccttgcagcctgatcttatgtagtcattttctcagtcaaggtttcctcctctctgatgactctagctagtgtcaagttgacataaaagtagccagtacacttatggtaaatattgcctatgtgataggctctttcaaactggtagcattttaattgtaattgtatacaaagtcccatacctttattccttccctttctagatttaagtgatacattttatatagtggaaaaatttgtttctgttaacagtttattgctattagcagttgtacttaataatttatcttttgtagttaaaaggatttattgtagagacaaactgctatacataacacttatggtgttagagtgttctgggtgtgtggatatcacactgttgagttttaggcattcatatgtttaatgtttaattttctataagaaaggcctcatgatgattcatagatgttgtttgtttagacaactttttatttttttctacatttctggagcactctgccaggtaagatattaactggaagtttttcttaaaatatgttacttcttttctagtttgtaggcttcaacagagaaatccatggatggccattttgagacaactttgaatatgaactttccttgtacaaacaaaaaaagttcattacatttttatttatttggagagagagagaaagacagacagacaaacagacagacacagacagaaaaagagagacagagagaggagagaggcagacagacagataggcaggcaggcagacagaaacacgcatagcatacatatacacatagagagtgggaggaacaacttgccagagtctgtgggttccaggttttaaactcaggttatcagattgagcaacaagtaccctcactggaaatatgtatgttatctcattttgttcctagaattctttctttgtctttggggtttaatgatttgcttataatgtgtctctttgcagttgagtttgactagaactcacacccatctggaattttgatgccctctttcagtgtttcattaaatacattctgggtgttttttgttttgttttgttttgttttgttttgttttgttctctctctgttcttcctgaatggactgttttgtgaaggctggctgttgtgatggtattcagtcacccctctaaacattactttatcctactttcctacttttatcactgaaaactttcagagctgagcatggtgactcatgactgtaatcccagcatgtaagaagatgagcgtgaattcaaggccagaattcagcatgaattcaaggactggcatgaattcaaggccagcctgggccacatagtgagtgaaaggacctgcgtagacacaggacacaccaagaccaagttctcagcacaaaggagatttatttgccccaaagacataaaaaggcaaagagacaaagatggggaagaggacagggaggagggaaagagaaaaaaagggaggagtgggggatatttgcactggagggacaaaggacagcctctgaatagagggaagacagacatgaactataggccaatggcagtttataaaagcaaaagggggaaacccctgtgttaggatggggtgtttaattttgattagacaggttaattagggtagccaatagggggattttgatggctggacttagctggaccttggaggagcaagtggccaaataagggaatagagcttggcggctggctttaggaatgcaatctaacagtttttagcaagaggagaggggtaaaaggcaaaacttgtttgcaccatgtttacaatgctcaggcctgccagagcccttcagtgagtttcagcctaacttaggctatagagggaaatcgtatttcagagagggttttttttatattttttggggagggggcaatgttctttcccagctcactaatttttctttgtaatccttgtcattgaggctttcggttgatattgtcagtttgattactatattttaaaaatatttataatattgtttgtttcttttatcttgtatttcatttgtcaaacttctaaatacgttgatgaaattttgttagtttgtttttttatcacatttatttggaggagaatgcatgccacagctcatgaatgaaggtggacagtcagccagcagagactcagctctctcctgttctacaggccctggggactgaactcacactctcagagttggtagcaaaagtctttacctgctgagccatcccattgactctggttttattttttgtctttcgcatatggaggaaatatttattaaatattttctaggtatgttctgtcaaattctgatcatatagcttgtttcaccccattcccaactaacattttcattaaaatagtgtggtccaatgaaattaatgtgagcctcatgtataatttctaactttgagaaaaaaatcaactgaaactaaactaacttactatcatacttaaataatcatagcaaaaatgttttgttttcactattgtaaacattaaagtgttttttttcatccttataatatcgtgtttgggggctatagagaagtctcaatgaattagagcacttgttgccattacaaaggacccaggtttgattcccagaatccatatagtggttcacaacaatccttaactccagtatatacatagaggcaaagcgttcacaaacataaaataaaataaatctgaaagaaatacaaattaattaattaattaattaaatctcatggtttaggctgacaatgcttcttagaatagtcccaattcagagacccaagagtcacctaaatctcaactgtcatgaaaagacattggctcacaccttcccactattgggtgtatctaccctcacatgctcaactgctacaatgcttcagactctaaaccccaaaggttaaatcgggtcatcccattggcaaaaattaactcaaggtctaacattgaactgatgcttgtgctacagaaatgactgacgtaagccttcaactcttcccttggctatttgcagaccctaagatgttgttggtatttctcttcatgtgtttaccacaataactaactgtttttgtatttccttacttacaatgtgtgcacacaggagtgtttctcccatactgttccctgaaagaaggagcatctatcttgttatatccttgtgcttctacaaaatgcattacagatattgtctaataaatgtatggatggctatgcattgatgatgagcttgagtcaggttctcatctcatcagcaccttccagttatgcacagcattccacattgtatcaataacagcagtaatggctgtctcttcttcaagaccatttctcatagacaaatcctaatcattaatgactcactggaaattttccactcatcagaactgtatttttcctatcttcaacttgttcgtggtctactacataacaaaatggggattgttcagacactgtgtatgagataacagcccttcgcagcacactctcagaattggggaatatacatccatatgcacactgtcactgccagtactgtgggaagaattattctcttggccttgttaggtatttttgtctgttttcttctgcttctccagtatcctttgagaggattctcctgacacttctgtaagtcatttcacagggctttgtttctttggtgatcactacaaagttcatcttaaagtgtcatgttccccttgttcttgtaaaccttgtgtccttttgttggtgtacacatgtttgatggagttgttcactgtggctttttcaggcattctttggtggtgacagatcttcattatttagccccaaactctgggtgggtttctagctagcagaaatcctggacaggtgatacttcccatcacgaagtctgcttgagtgagatgctgcctctgcttgagagttagggaacctctagctgtgccctatggtagcagaaatgtggcatgggactctgaagcagagacattctcaggtggcctcatccctccactcccacgggaagtgtgcagcgatatgtggcacagtatcctggtggccccaatagcaaacacagaaagattgcctttgcttgtttgaattacaaaagctcccattcattctaatctgcagatcaggacaagcagacacaggaactataaattgccaagcaggaaggaacccaccgaaggcaagatagtcacctcttttgttttattatttgtttttttgaataaaatacaaaattttattttgtatttttcactttttggcaccacacttttgtacttgaattgaatgggtattgttttaacaggtgatccatgggaacagggtttaaagctatcctttctttttcctaaacctaattccaattgattcccagttctcctccctttaatcctgacttctgagtcttgctttatgaactcttccaccttcataaccctcctacttaagtagtaagaactatttaagatttgacagccttagcttggaaacctatagattgcggtttccctaactaactaccctggtgtcacaaactgtcagccttaaaggtgacacagatgatgcacacagatgtcttctctgcagttacacagactgctgtcaagccactataattacgcagtcaacttcctgcctgagaatagcacctcgtggaggcagctcaccaggactcatataaaataaaacaaacaaaaatggtgaagacaggtggtaaaaataaaacacaactggtagataaatatatcctaaacaatataaaagggaacacacacgaaaacaggagacagcaattcattatcaatatcagaaacatttcaatatcagaaatctaaggtaatgagatagctgatatgccagaaaaagattctaaactcttagcctcttaaaaaaaaaaagcaatgatcataaagaaggctcaaataggtagatgaatgaagtaaagaaaattaattcaggacctacataatagtaacacgcagagaaaaaattaaaacacagaatgaaaattcagcccagaatttgagatgcttaaaaagagccaaacatgatgaaagaagcaaaagacaaaatgagagcatcacaaacagacaaaactaagagaaggcattttagggatgctggacagagttaatacaaccagtcacaaataagaaagaatattaatgaacatgacccaaactttcaaatactctgggataagttcaagaaaccaaacctgggaagtcatgaggcagaagatgtagaataaagtctcggatgattattcaatgaaaagagaagaaaatttcccaaccctacagaaaaatggatatacaaatacatgtggcatttacattctccaattcacatgaccagaaaagaatttctccatgatatatcatagtcaagatggccaaaatacaaacgggctgtggagatggctcagtgtgtcaatcacttcctatgtaagcaccaggaccagaatctggatatccagcacccacagaaatgccaagtgacccagtggcccacctataatcctggcactcaggaggtagatgcaggagatcctggaacagggtggttagctctactagtgggctcagcaaaccttgggttcaagtaagaaactctgcttcaatatgtacgatacagagcaactgagtacattctgcctgaagaaacttcacccaagtgatttgaattcttattcatggggttccagggaccatttttgagggtttcatcaaaattctaagtcagaagttccaaattaagaatcagggaatagaatgtggaagacagtgatgtttttgtggttagcaaactagttttgaaaacatccaagtgttctttatatacgaacaactgctatttggctcctcaaagcaccaaaacccacaatacttcatctcaagtaagtgccccatgagacagtcactctaaggtctttcccacactccagcttggagtcttctgggaagttgatcatttgctgtgctaggtatgttctgcaagtgtgctgagaaggcacatgcctggggcagcagggagagagatgacagggcaaaacatgacagaaacaaagagaaggaagtctgccagctctgcctttacctccgctccatcctctaattctgtggtattaggtaacctactcaagctggaggggggtggtgccttgtcaggggtcaggagaatcatctcagcttctactgcagtcgggcagctgtcagccatcagcatatagtaatacaatacagtaattctgttcagttgaacaagtgattcctttcacctatatggggccatatattagaccctcagaggtagtatagggtatatccacattcttgaggggcaggctgtttaaggaagtctggcatgtggacagcaagagggaggatatgggagtgaggcagagactctaggcccagaatagtgtgtgtgtgtgtgtgtgtgtgtgtgtgtgtgtgtgtgtgtgtgtgtgtgtgtagattttctggaggaagtaccaggtgtgaggaaaagagaggcagtgagggcctgtggggtgggggtgtgttgcctaggagacagggctacacagtggattatgaatgatgtaacgtgccaagaatttcaacataaatccaaattcattgaggatccttagaagattaatctggaaaatgaagtaattaagtttgaatttttgaagttagatcctctaactagatccctgtaaggctatatcaaggtattttaataaacatagcatcaaattgtcttcctgggcttgtgtatattaatgcacatgtacatctagaaaattctaggtgctccttttctcccattattttgtttgctttcttgctttgtccactgataccgacatgaaattattctaacagtcaaagcagaccaaacaaagcataatacctagcaaatcatacttttaagttgacaagacaatgcattctatggaaactaactagatgttgtttgagactttttttctaccttgttctttttgcactcttcaaaaaaaaatcaaaggaaacacaacaaaatcaatctatgaagctatatgaggtagtgcatgcctatagtatgtgtggtagttacttcagctgtccactcaacatagcccagagtcacttgggaagagggacctcagtggaggaattgcctagatcagattggcctgtaggtattctgggaggcatttttataattgctgattgatgtaggaaggccgagtcctctgtgaacgatagcatccctgggtgggtctggcctatgcaagaaaggaagctgagccagagagagggattgagccaatatgcaacattcctctgtggttcctgccctgacttccctccatgatggataataccctggatgtgtaagcctaacaggccaggtttcctcccaagttgcctttggttacagggtttgatacagcaacagcagcaaactagagcagcctgcaaggccaaaagtatagaagtgggcagggtgtcagaagttcaaggttatcttcagatacagattaagttcaaggccagtttgggtgatgtgaaatcttgtctcccagccaacaacaacaacaacaacaacaaaaggaaaatactgaactatgggtacataaacaataacaaaaaacaaaccatactacacctagagattgagagtaaagttcactcagatctttgaaaccctatccaaaagatttaaggtttggcttacaaacaaaaatatatttaaaatgtctgggtaattcattaaaaattggcaatatattaaaacaatagcattcacaattgtaattttaaaaagtgaaacatgagagaaagatgccatatgatagagcttgggtggaggtatttttattaggggaaagtctacaggaaaaggtgagaggggagaagggagactggcctctggggacaggagtggcagaagagaagagaagagaagagagagagagagagagagagaggagaggagaggagaggagaggagaggagagagaggcaaatagaggggggagaaggagtgaacagagagacagagaagcagagagagtaagaaagagaggaagacaggaggtgggcagggcccttttgaaatgcaacatagtgaatgttcacaggtgtgctctttgtggctgcagcggagggtgtatcctgtcagaaccctaaggacaggatggtacagatgcctgaatattaacaacaataggagcagtatcttgtaaaactagaaaaccagtgagatcatacatacattgtgagtcaataaaacatgcatatgcatagaaacagcttaagaatgtatcaaaaatcagctatcattgattatcctgaagatgtaggcatatgggtaattctcatttttttctcatattttattttcccaatttaaatcatgaaggctcatatcaaagaaaaagcttttaaataaactaccaatcatgtagtatagcgtatatatttcaagtgcattttccattgctataacaaactgttagaagctaaatgttttatataaagaaaagtatattcacggttttagagactagaattctaagattgggtggggcccttggtttagtcccttgcaaaggtttcatggtagacagggtcatgatggaaagagtgcctctgagggcctgtgcctgctgggatagtgagccagagagtggaaggggcccggtcagtctgacgcttttataaagactggctctttcagaaactaactagggcctataaaactgttaactctccctgaggtccgtgcccacagtgaactagccttggtcatagttagcaataagtcccactctaaagttttcacccccttccaattataccatgcctaggaccaagctaatagatatatgaccccttggggtagaggaaacactaaaaccaaatccaaactatagctctctctctctctcgctctctctctctctctctctctctctctctctctctctctgtgtgtgtgtgtgtgtgtgtgtgtctgtctgtctgtctgtctctgtgtgtgtctctttgtctctctctctcattccctccctccccactccttgtgtacaaaaggtctaaaacattcaatatttatttctgtgggttgaagcagagctctggtttttaaatgtcagtgaaaacaaaccagaggctccacttgtagcctctaagtgtggttggcttcacttggcttttatctgatgaaaagaaggtaacaaagtacatgccaacaatgaagtcaaagaggagaaaagagaagctagccaacctcctcttgggtggtggatggagctggggatgggaacactggagtgaggatgggaagttttgccaaatactgattctgagataacaggattgaaaaatgaccgttttccctgccatgaaacaaaaacaaaagccacctgtagaaataaatcaagttgaattgagtttgtaaggattctaccagaattcgccaatggtacttattctttatggttgaagaacatagttcctctctagtgaacactgggatgtaaatagtatagtgcatttaagacagggagaattttaaataattgttcactttcttttgctcttatacattttcttttgcttttgaattctgcttttagcttgagaaaattctcaacaaccaaaaggaaggatcatgttagccaatgagaattaagctaaacaagagtgtgcaagaagtatatctacatcccctttgggacacagaacaagtgggtccttatgtctctacttctgctctcttggcttctgccaaactttattaaatggctgtggagagcaatgcatcaaggcatgatttgacattgtaaaagataaagctgtgttcccatgggcagtgtttgtgagacatgttcagaagggagtatgctgaccaagggtggtgaagtcagcctgaagataggctgggaatggaggatggaagctactctcttcatgacaacagagggtgactctgggactttcaataaattagggaaaacacaaggcaattaacaaacctagcctgtcttctctagattctgtgacccccttcacacaggattttagtgtgacataagaaagaacttccaggcctgtagtgcaactgtcccagcctgggcttccactgagacttataaccctttaaacaaattcaaatacatttttattttttaaaactccctgtacctccaggcgttggtggcacacacctttaatcccagcgctcaagaggcagaggcaggtggatctctatgagttcaaagccatcctggtctacagagagagttccaggacagattccaaagcaatacagagaaactccatcttgaaaaaaacaaaacaaaacaaaacaaaaagcctccctgtattttgtgtgtgtgtatgtatatatgcaatcttgtatgtgtgtatgtatgcatgcatgcaatcatgtgtgagtatgtatgtatgcatgcaatcatgggtgtgtgaatgtatgtatatatgtatgtgtgtgtgaatgtatgtatgcatgtgagtatatgtatgtgtgtatatgtatgtattcatgcaatcatgtatgtatgtgtgtgaatgtatgtgtgtatgtgcacacacctgcatgtggagatcagcagacaatttgcaagagtcagttttctccttctaccacgtgggtccctgaagttgtcaggcttgctggcaagttccttttctagctgagccatcttgcaagccctcaaatacattttctgaatacccaatttcccgtagaaatctcctcagtttttcaggttaactgaagggcagagagcagatacagttggaatcctaactttattttcatcatgcctatcatgatgacctgtgaatattaaaaggctggcgctttagctaagctattgcttttgtcagacaaatcacactgtccttctcatttaattttgttcccttttacacagacacagagcagaattcaaatatatgcagctcaatagttttccaattcatacccctaccaaattcttcatggcatttctacttattagattgactttttagaaggatattttagacttttaagcaaacagggaagtgtagtacatagaactgtttcgaggagagctgcaatgttcagttgtttgggctgggcattaaatagaggtacgatttctgcagcgttgtatctgcccttagagaacactaactaatgggtatagaggctggaatgaggttcccagcagcagagaggttcagagagagagacagagacagagacagagagagacagagacagagacagacttagactgattgggttttagcctgtagtataccatatgaccttaaagcctttcccataatgaagctatagtgaagtctttgttttcttttcttccttttggacagggtctttctgtatatcccaagctggtctttaactcttaatcctcctaccaggacccctaagtattggatcctaagttctaccagcccagctcatgatagtagtcttatcatgacaatgtggccagtgtcataatgaaaggtgaatatttgaacacaaagggagcacactatgaagacacaggaattccatatgcagcctgagggatgcctagtggggagccgcaggaaagagtccctcctcacagatagcagagggagcctggacctctggcaacacctccatttggacttccagcttctgaactatgagacaataaatctgatgcttcagcttccagttcatgctactttgttatggcaggctatctccagctttctcagtctctctagttccaggcatcttgtctctctctactttctgtatctggctcttcttaccccctttacttctttcctctgttctgggctccattgtctagtcagtaagtcagatccaaggaagtctcagagaggggacactcatgttagtcatggtgactcagaattgcttgtttcaggcttagaccaagctaatgtgtttactctgtttccatagttttaactctggatagtgagtgggcagtgcacgttcaaagctgcacctcacaagtggctccaagtgagaattgggtacccaaatgtagagtactatttgggtcaaaggagactaaattctgtactcagaactagtgaccttctattggccattatctgtggcaaccaagcatctccatgctgtttgtattactgtcttcccagcaaaaagacattttcatgatcattcagattgattatcatcttaatcataatctgtataagattgatttaacatacaacctgtcaagattacagatggaacgaaccatggcaatctagaaactagtactttccaggaagtgctgtggccagattagcaatgggcatctcagaggctgaattcccaagccagggctcagctgtattgcagtgccctgactttctccagatgataaacatgacctttcttctttgggaagaagtaggaaattcatcggtaggccactttctctgactattgtgtgtgatgttccgacatcttaccatgcatttggtcttcattatgaagctcatgtatgcctcagttctcaaaggttttatgaatacatcagccatctcgggccagactcttcctacacacccacactagcacacacacacttctgagtcatcacagaggaactcctactttccctagggagttattaatggtgacacacgacagttccctcctctgttactggcatatgaactattatgaaatgcagtcccgagctgcctcatactgtgaaataagatatgtatggccaaaatggcagctttgtaacatttaactccatctacataggacctgtgcatcttgtagacctaggctctgggttgcaatgtctttgttactgaacctctctgtgtctccacatccctcacaagtagagaatgctgtactgaatctgctgtcttctgaagtaggtggatcaagacaagagaaaggttttcactccaggtctccatagcttggtagttctgctgcagaaatggtggctcttctgtttagctagttgtgtctgtgtatgttgggggggggtcttactgtagttggtattacagaacgaatgtagtcctcccacacccatcaatggactcagatcacggggagcttataatggatgtaaactctcaagcatgccaagagaatcaaaacctatgaaactcatgaatcaagacccccacatgactgatgcacactcaagtgtgaagaccctgattgagataaagaaggcctagagctggcttgagaagaggggctagctaatcaattgtctctaaagttagtgaggggaatccagggaacctgtaaggtctgggaggaggctggaaaaagatagtggcagaatggtgaaagaatgaggtggcagaggcagcaagcaagccccagggcagaggtgacaaaggactttgagagcagggcttcttccttggtgacttagtttctgttattcgtttgtgctgttttgtaatttttttaacctatttacctcagactaaattatttctttacaaaattctatgacttacattagacatatatggtggtggcttagttttagggagagagggatgggtttttagatacataccaaggtaagacaaagatgaccatgggcaaagaacaaagtcaaactcagtcatgatgccagaactcaggaatgctcaacactaggcaagggtctctaggccctggcagtactggccattcaggttggctgttccttggtgggactgtgatattaactgtaggaaggctgtacactctgaatctttaatcactgaatgctgaactagccctagcccaagctgttgtcgccaaaaatatcttctgtggctgtcaaatagaggagaccaacccccttgaaaggcatggttttggagttcccaggatcttcttaagaacatgtaatgagtggggtaattgaggtgtggcgagtctttttgtttttgactgagtgataagtgaccagctaatgttaacagcatctgatggctggtacaatgggagatgatttctctaacagaatattataaaacttaatgagaatatttagaaagtgcatgataaaggcagcactcttgctttttatttctgttgtaaagactttggtaggtcctgatccgccatctatttgtcagaagctgtgaagggtctaaggttttggtgctgaaacttgtaagctaacaagccagcctgctccagctccacagatatccactgatgacatgcagcggctggtcaggacctgggttgtctattagtacagtcatggcagtggccataggaacagcactttttctggagatgatgctccaaccctagttcccatcagatgtcaccaagaggatgaggtgatgtattcatacacagtggctgccaagaagcaaatgagctcactaagtagaaacttcactaaattgtgatgtgcacacatcttcctctgccacacatggctgttcatcatgcagatagatatcaatgtgaaatatgaaaacattcaatgccttgaatagactgtcagtgcctctgtccacaggatgtgtaggacagcgagacagttggcccagcactagtctaagctttagggactggagtcatgtaccacccatgtaacctggtacctaggagatccttcggaagcatcttttagatacaatatcaaaatgagtcatgaagtgccccaggaaagttttaaagactcatgcttagctcaagtgaacacaattagacagttttagtagtttctgattattataacaaattgccacacacttaattgtttcaagcaacataagtctgagtcctgtaggtcagaagtttggaatgagtcttactgagttaattcttactgcatttctttggtagattctggagagaacttatgtagtgccttctctaccatctaaagaacaccatactccttggcttgggaccctttgctccatccttaaaaccatcagcatagcatctttaaacatccctgactctgaccttcctacctctccatctatcggacccttgcatttatattgagaacatgcaaggtattctccccattcaacattctgattttaattatatctgcaaagaccatttcgtcagataaggtaatattggcaaagtttgggggattcagatgtggggagcctgggtggccatcactgtgccttccatagccacctgcccttctgtagacaggcaggctttatcgtccaatgagattcttctagctctaaagcacagtcattccgagtttggcataagaaatgaacttttcccttcacactctttcttcctcctataatttacatttggagagcctgtaaagtatatttttacaagtcccccatttagcattcaaagtaggctgagaccaggtgctctccaagaaatactaggagacacatgtaggcgacaaactatgtttactcgtgattttccacattatgtagaggagattatgtatattttcaagtcttctataaatttcttccataggcaaacatttctggcaacagtcatgagagcttccttgaagtaattgcacatgactaatgatcagctcttttctgtcagagaagaaaagaaaatactgagctgaaagctctagcaagggcctaacccaaacacctcagctaaccatcaacacaaacacattcagtgggtgtagtgtggccagtgttcagatgacattatgttgaccaaggcccagtactttgcaagtgggcaaggcacaaacccattcaagcttcctaactgtgtaacactgatgcttaccaagggctaaatttctttcttggctctcagttcttttctttttatgaaaaatggcatgcatagaaaaatatacaacacataatgcaagcatatacagttgttacctagaagaaagattggcaaatgtgacccatggctgaatgcagcctgacaccctcctccctgcttctaatcagggttttattggaacatgactgccaatcccttcacatattatctatatctgctttcagctacagtggcagtgtttggtaattgtgatagaaaccagatggccctacaaggctaaaatagcttctatctgtcctttcacggaaccagtttgtttactgatggttaacagtatatgtcaacttggctatgctacgtggtgcccagattaaacagattgtccttcagtgtgtgtgtgtgtgtgtgtgtgtgtgtgtaagccattgaggcctgaatggaatgaagaagcagagcaaaaaggaatttgatgcctgttcttttctcctacctgcctgagatgggacatgaatctcttgccctaggtttaagatttctaacatgtgcatccctagagttcaagccatctaattagtggtgaatttacacctccaacttccctttgcctccagctcacaaaagtcacatcatggggttgccctgctaccacagcctaaaaaggccctcactgtgcctctctgcccctcacgtgtctgcatgtgttctgtttctctgaagaagcctggctctcactgcagtcaaggaagagtcgtgcgaacaccctgcagggccttcagtctttcacccccttctcaacctgctcattgccccatcagtgaccactattctaccttttggtttgtttttatttttttaaaacaaaatggtgttttttaaatagtcttagaactgaaattttgacagacaatagagtccagctttgtgttgctttgtgttttgccttttaaaggaactatcttgataacagatgaattgtttgtgaacctggttacatgcacatgtgtgccacatccatgcaggccagtgagtctatgtgtagaaacaggcctacagaattacgggacatgggttacttactgctttggtttactcctaggtcacctcctaaggagtttaaccagttggcacatcacagacaggcactactgaatgtgtagagattttgtgcacctgtttgctgagggtatctggaggcaaagacatctcagggtggtttaagggcatctccataacatagatcttgggaacttgttatgcttggcccaccagaattctctgaaatgcttgttcacattttctgcccctttccctgtcaggttctatacatcatttctcattgatttcctcttcctcatcgattccacgggcctcctcagctcacatcatctatcagctactgcctcactcccctgctcagagcttctgttgttctcagggaaaataatttcttgagttttaatgtcaattttactgtgttttgttctataagtgtgttcttgtgcctttagttcttccccaaagacacttccctgggccattcttctattcttccttcttaaagcttgccccgacagaatatctccattttaaggccgtactactttttctctcacagtttacttacacacagagaatttgtttctgtttagtgtcatataaaatactaatcttcattttaacagatttctacccagataatttaccatgctcagctacacactgagttcatgccatcctgagctactcaaggccctaactcaaaaaaaaaaaaaaaaaaatggccatttccatcggacttctctcagggcttctcctttgtacatggaataacagtgtgcacacagacaagttttcctagttatctaattcatttcactgacatatttatattgctgtatattaggctgtcataatttctagagaataaattgtgacaattcataggacaatatttctcaccttattctaccagggtgtatgtggctgtttcatagtctacattttagaattaacttgtcaatttctagaagttattatatatatatatacatatgtatatatgtatatatatatatatatattttggggagattggctatttataatacttagactttcagtctacaatcataaattatggatgcatttattgtctatactatacatcttcaggaaagtttaatgtcttacatatatttggttagatttatgcctaataagttcatattttcaaagtatggactgttggactctgacttttaggctccagttggtgcattcagtgtgtacccagaaacttgctagactcccccacatagatttaaaaagctttttggtatctttttactttacaaataaatttattttctgccaatggtgaaagctgttttcatctgttaaccttttctcctggtgtctggtgctgattagcccctggttccatgttgacagggcagcaagggtaagggtgggggaactcccatcactctgattccaacggagaagcacaggaaatttcaccgaaaaaccccgtatgctatttcactttggggaatcatatggatctctttgtaaacctgttttcttttttgtttttttcgagacagggtttccaagtgtcctggctgtcttggaacttgctttgtagaccaggctatccttgaactcacagaaatctgcctgcctctgcctccagaatactgggattaaaggtctgtgccaccctcacccagcttgtgtccctggttttctataaataaattacatctgtcataagccttttctttatatagtaacaagttatttgattattatgtatctgggaaaaaaatcacaataaaagtcaagtaaacttaaagaaagaaaaaggaaatgtttgatgtattaatatggctaattgcatgaattggaattctaaacaaatctttaaactacctctcattctcagagtaaaagcagtaggtccagatatgtcgtcttctcatatattactagagtgtttgctaacattttctctgggatttttgtgcctgtgtggtagattggtctatagttttcttattatccttaaaaagcttaagtacatagttgtgcttactcactaagtgtgagtggcatctactaaagatgccgtgtgtatgctgcaccatctctacctcctttccatgtaagacagttccccttgaagttcttttagccaataggagtatgaaaacaaagcacttcccatctgggtcagacaagaatggcagctccttgtccgtattctcctgtgtaggctgctgtgtttagacagggcgattacatggtggagagaatatgcatgggtcaccatacttgactattaggtctattcattcctttgttctcttgttgagaagaatctgtggacaactggaatagtcttccttagagctgagggaaaatcacctatgttttcagaagatttatgacttctgatcacattgtgttaatagttttcagcctctccaggccttttctctttaagtaaatttcttctcatccaatccacaggaagttagtaaattatccaccaatcatattttgaaatgttcatgacacttgtcaagtgtccatcatttcctttatgacacctatcatgtgtcctttgcttctcagcagcttagcctgaagtttctcagtttgattaactctgcaacaaccagctttcctggctctgtgtgaacccttcattgtgtgtcctttctatagctacttgatggttttgcttttatttccttttcctttccttgagtttattcagcttttattgtgatttcccaggcaaatgtgttacctcatttttcagatattgtttcaaattcaattatcaacagttataaatctccaaatactgggatgtcttcccttgtatggatacaaaagagtaattttcatttttcagcttttctgttttcttctgtgacttgttctccgaatgatagcttatgttatggtagctttcttaatttctaaatcaataaggattttctaattatgtttttctattggtttttagattacttgcagtatggcagagaacatagtatctatcattcctatcctttaaaatgtgttgaatcttgctttgttgttcaggattttttcaaatgcccttgtatacttaaaaagaaaatagattttccactcattgattataatatatctgtgtaagttaagacagccaaattatcggttaatcattttgtttaaatattccataacatggctgtgctgggtaactttatgtcaagttgacaaaggctagaatcacctgagaggggggaaacccaatagagaaaatgcttccataagactggggtgtatgcaagcctgtagaccattttcttaattagtgattgatgggggggcagccaattgtgggtggtgccatctctgggctggtggtcctgtgtcccataagaaaacagactgagtaaaccatgatgagcaagctggtaagcagcagtcctccatggcctctgcattagttcctgcctccaggttattgccctgtttgcattcctgtcctgactccctccagtgatgaacagtggtgtggaagtgtaagccaaataaaccctttcctccccaacttgcttttgtcatggtgcttcagcttagcaatagtaatcttacattgaacaatggcttttgtggtctgtttcttgtaacagtttttaagagaaccttattaattcccctgattattcattttacatttctttttatagttatatcaattttaatttatatagtttgtagatgagttattgtgtaaagacatttaagactgtgaaatcattgtggtaactctctgagactttaagttaattactctggatggatcactatacaacatatatacactagaatatcatgtgccactctgttcataaatatatggcattattatgtacctactgaatataaaaagaaaatacaaagtagctttctgataatataaaccatttatccttatgaaggactatattcatagtgatatgttttgccttaaaatttgtttactattgaagtaactatagtatttataaatctaacatgctttaacttttcaagctctgatattttaagtatatatctcataaatgtcatataatcaatttacctttatctttattttccaaacatactccagcctttactcactaactagttaaatttacattaacataattattatgtctgttttgtaatatcacccccatctgtcactccctccctttctccctccttccttccttccctccttctttcttcctgtatttggttggttttcaagctcataccccttcttcttttgttgattttttctcattctgtatacattttcatttgtaagctgtatgttttgttcctctccttttctgattactgtaactgtacattttacagtcagaggctattctgtactgttatttggctctcagaatggcagaagaacttagagccctgaaatccctcctccaggtttctatgtctgcgttttatttcccctttgtcttttttaggactcactaagtactattgcattatttttattgtttttgtacatttaactctgtccttacaattccattgttctccatatatttactccccaccttgtattttgaacttgcaaacttaatttccatcagcagagtctttgattagtgcgcatcagatgtgtaaagctgtctgcattgcctcccttcatcattcagaggtttgcacatgatgtccagtgttactggttggaagtattcgccttctgattagtggtgatggtacccataaacccttggctctgctgctgccttcagggagtctcctgtccacacagcagctgttccctccaaggcagtttatctttttcctactgaagctgatttgagagcttctctttgtcttaggtggtttctcggtgagttttattaacatgtaatcacatatcttttttactactgttctcagatttggggggcttttagaactgtgagctggtattcttccccacttgagatataaatatgaagtctaagtatgacatctaaccctttatctcccttttctatttctagagctccgaggaagtctgttggatcttcttttttgaaactttcatacttctttatcattctcatccatagctcccattccttttcttgtccatgctactttctagatcactgctacagtgccatttttcttgccatttccttctaatcagctgtatactagcttcatttcttatcttggtagcagccaggtaaggagagaggcaatgaattctattttgtgctggtggattctgagggtattgtccatcacggcagagtagtcatagcaaccagagatgttccatctgcaatgatgggaatgggaggtggccatggctcttcacactgtggtgggagacaggaaccagggcatccaaacccacagtcccacccctgtgttcctgcgactgcagctagaccgtgtgtaaaatatgccacagttcctgtgaacagcatcaccctccaggaccaggggttaaaaccttgacatctgaacattcattgtaaccatagcaagctccaaacctacacattcagcttttaattttctttactgtctttcatgaacagaatgtctatgtgctgtttatgttttatatacatggtgggtcactttgtatatgtcaacatctgggataaattgttgaagtgtctcttatttatatattataaacagtacattgtagcaagcaccttctaatttcacagggttctgtaggctgctcattcatttgttctctctccttgttactcgtgcatagcaatctctttgcccccctttttgtcctacaaaaatgcttatagttctaacatgaatgtctctctctctccattttttgttggtactttgagacagggtttctctgtgtagccctggctgtcctagaactagctctatagatcaggctggacttgaactcagagatctgcctgcctctgcctcctgagtgctgggattgtaggcgtgtgcccccactgcccagccagagtgctatcttccacacctgagtaaaaagctaagaccacagcacatacttctaatgccagtactagggaggcagaggcagaaggattgctgggacttactggctacttagcacagctgaatctgtgagctccatgttcagtgagagactctctcaaaataaacaaacaaacaaacaaataaataaataataaatagggaccaattgaggaagatgcctgacattgatctcatacatgcacatacatgcatttgtattgatatgcatgtgaacacacacagatatatatatatacaacaaatatgtttttcaaaaacagacatgacttgaaggtttgattacattggctggttaggaagctgttgggatctgcctacctctgtccttaatactgctgttacaaatgtgtagccacgttcaggtttttacatgagtactggggactcaaactcgagtgttcctgatgtagagtgagtgttcctacacccggagccatctccccagtccctaaactgttcttacctaaagttttgatacaaataacttaatttcattttcatagatttgtatgcatgtgtctctgtgtggtctgtgtatgtgtggtctgtgtgtgtgtgatctgtgtgtgtgtgatctgtgtgtgtgtgatctgtgtagtctctctctctgtatttgtgattgaattattgaaatgttacatcctaaattagtcaaaaaggacattattttgggttcctgatcaggcttgaaatctgaagggttactgctgcctcccagatgctgtgtgtctcccatactctgtccctttgttgtagtggcactaacaggttatgcaaagtcctcaagtgcaagtgccctgcggatgactcttcagtccctggaggggactggtcagattgcactcagcctgagcctcacctctgtcaatgtgacagctcacatctttatgaaacatagaagctaatggagcacttcaaccgttattctctaatttaactcacagcatcctagcaaaccgggcaagtcagggacagttactgctattttcagaagacagctgaaacctgaggaccacagctttgtcccattatttagtgcccttggccacagtgctcattttctacataatacaaatgtaaatgtattggcaaaatgaagactctgaaaggtaggctacccagtcaacatcccgattttactgacagggctgagaatgatactgtactttatagggattcccactgttcctcttttcattgtcagtttcccaatgagggttggaatcttaggaactgtggcttgcactacctcaccctggctccctttcttcctccctttctgaccttgctacacccaccccttactgtcttgcttttcttcctttctctcttcatcatctgtttcctctatcaacatctacccacttgagttttactgaaattaaaatgaggaatttcagaagggcaagtgagagatctgaatcatctctctggagctgtgtttcgaggctcagatcgagcagcagaaacctcgtgacctcagtgtacccccagcatgctctggcttcagtgtgcttttcagtaaaatgacattgtgttgacagtaccagctgtcactccctctgggatgcaaaccactacacccagaatctccagtcccaaggaaagaagctctgcctgtaccatgttacccaggacatcctttagccttgctctctgtcccttggatctgctgtccacgtcccttctctacctcggtgaggtgtgcatccctctgtaactccctggtggacaggagttaatcctccagtcattttggggatgaaatgctgactcatgcaatcgcagtcagaaatggctttctttttcagagagagttctgcagtcaggctgtctgtgtccagacaggtaacttgatttaataatgtagttcttgagtaaatgtgtaaagacaagggtgtcccaaggatggacaaaatatccagagtagggtgattacagtggatcctagtgccagccaatcccttcttcagagttatagataccttcttgatgtgttccctataaaaggctctgctgtttcagggagtggcttcttagatccttcaaacctatcattgcccaagccaatgaaaagctaggtgctatttgtcagaagctcagttttagatgaatatgaaatatttgtagaaggctccttgtcccccatgaaaactgtggtagacaattgtctactgcagccatatctctagttaaacccacccagggcctaattagaacatgctggctccccaccatcaatgtcatgctaggtactgtcagtctgaagctcagttttagaggaatatgaaggtttcccagaagatgtctgtctcctgtgagaattgtggtagacaagtatctattggagtcatatctccaattaagcccactggggaccttattagatcatgctggctcaccaccagtatctagtctccttttcaaataggaattcatgttattcaggatggcactatactgtcttaaaaagtcctaagtcccaatctctcctgtgggtgggtgtggttttattaattccagccaataggctgaaagtgaatgcaattggatggagcaaggcccaacccttaaaggagaaacaacagggtgggcctacttccctttctctatcctctatttgcttcttagaatgagccctaactgatgagaccctacaagtgtttttcatacactaagtgagcataggatttaaggttggtcgctctgtaaggacagcagcacttaagaataaatccaacccctagtgatagggtgttgccaggttagctttaggcttgcttctgggaaacaacttttataaccagggaaagaaagaaaaaaaaaatcctatgtgtgctctctcttgctgttcttggttctctgttaatgagccactcttcctagacgtcaagatttgtgattcctagctaagtggaagccagaatcttccccagtactccaccccatcctccacaggcttctctcctgtcctgaataatctacttaagcaacttgtgcctgcctgatttcttcatgcaagaataggacactgggacatctgccttacttaggtagtctccagtacattcttaagtaaatgttatttttgttgttgctattattattattattattattattattattattattattattatcagtgtacatgaaaggcacaaagctgtcctgacactgatgttgacttcccttcggccttgctgcatctgctgctcccttccaaagtgcttgcatctgcctctgattgcctcacagctgagatcatggtgcctgctgacctgccggcagcctctgcttcttctgtagagatgaaggagatatggatacacacttgcatacatatcccattcttcccttggtttctgaacaaagggaatacatatatctcattaaatatatatgtgtatacttactgctttgtattcagggtgtaaggcaacagcaactctggggagcacatgtctctattccagattaaagccctgcaaagtttacaggatatagatatcgtctccgatctacactctgcagaaaagaaagcacaaccctctccatgacacagggcaggatggagcaggtgttattaagctctgtagacacatgtcatcactctgcaaacaaaacagaagaggcctgcttcaacccaagggtagaaaaccctccaacggaaatgagtccagctgcctttagtggtctcccttggacatgaaaataagactggctgaaattgaaaatgacatgggaagaatgaggtaccatttgaggaagacacaaaacaccatgaaggcctgaatgctctctgcccccgcccctattgtgcagcatctgctgctgacctgctgccatttgcatccttttgtgctgggccacctcagagatttctgagacaggacagaagtccagacctgctctgaataggtcattagctgagcatttgtgtgtctagctagagtgactgcatgggatttgctggcaggaggatagtcacatgcttgcagtggcaatataaaggatagctggggctgggggtaggggctcccttgaagatccccaggcaggtgcaggggtagaggagtctgacttctgttcctttctagaaagggctgttctgattttcctaaatatgcttctctgggagagggcgggagagaatgcaaatgagtcaaaggagaaacaattcacccatgcaagcacaatctgggtgtgaatttaccactctgagtctcctgaagatcacggccacatcagcagccaggagggctgtgctggcatggttcagagagcaggctttttacgcgcagacagccaggatgtgtgcatcactcactactcagttttgcaagtccaagtggtctggctgctcagctggggtcagggaggtttaaaaaaaaaaaaaaaaaaagaactctggagtttacaaacccaaggggtcctcctgcactcaggagcctgagcatcctgaaatagctgcctgggggctctgttggatattgaaggtcactgacagtgcacagcttaacaaaaagaaaaatctccaaacagctacattttcctgccagattcttatgctcctctcagtcttatgctcgctgtcttcccgatgctttggataattatcaaatcgctctcccatcggaacagatgttgtctgaactgctttgcagggctagtggagagagactgattaggcagctctcgatgaataggcacagggaacttttcccttctctgtggtctcggaagcacagtcattgggcctcacttgtagcagagtaaggcggacagttgctacagttttctgtagcattttcaatgtgcaaatgctggaggcttgggggggaggactaccagggatataatgaccaagctgcagctttgaataaaaagtaaattggcttaaagacagtggaggtaaaacaaaggggagcattgcttttttccccctcaaatagcataaaacattgatctaatattaattaaatccttattgaaacaagcacccacctttattctggagtgggtgcttccacagtgggtgtaactgaagcttaggaaaacttggaagactacaatgcctttggtttttaaaccagatctctgtgctgctctcggagaaacatttaaactgagcatcctaggcatggtgctattattgtttattctattaccagccacatcagtgacaatagcgtagtccatcccacagcagaatattcaaatgccatatgggtaatatggtttctcttgcctgcatcttctgagcccatctgagccaggaaatccagctgcttccagggaagggattatagccttgccttgggatctcattaggtgcaggtgtggtggtgaccagggcttctgctttgtgtcataggatttccacgtggctatctttctaccaggcagagcactacatgtgttcttcctgaaatcccagggtgttcggaggattaatgagataatcccatcataaaacattttgacatcaaaagtagacctgccctgtgaaggggacaagctatacttggcccttagtgaaaccattatccctacacaaacctcactggcccctcccctgtggttgtgtaaccttggcaaccttcactctgcatccatcacactgtattgtcactgtgtcctctgtgtgccagaagaccctggaggtcagtgtctagttcctttttctcttctgagaactggttgagctctggatactgtaggagctcagcaaatgtttgttgaggaaatgaaaaagcacctattatcatcatcatcatcatcatcatcatcatcatcatcatcatcatcaacgtcatcattataagaagaatatacttgctccataatgtttgggaccagaaatgtttcagattttggaacttttcacattttgaaataattgcatagaatttaccaacccgttgaatgtctctagtctgaaaaggtccaaatctaatctgaggctgcttgaatatcatgttggctcttaaaaggtctcagattttagagcactttggattcaggtgtcatgacacaggatgcttgatctggatcataaagttttgcctcaactcagcacggcttacttttagaaaatccacctctatttagtttaatgagaaaagcacaggagggttgggtatggaactcccctccccctgcccgccccaaatggccagcttctgttctctctagtaaccagaattcctttgtttggcagaaaaaaatagtattgatgagacattcctcttacattcaaactgtcatttgatcactcttagaattaaaacctatagctctcagaatggccaggactatttgcttctgccataccccaagtttatagaataatggaatgagacaaaattaagtagttcccatccacatgttatgtagcacagtgtttgactggtgacctacagttttaacctggactgagattcttgctggttagtccatgtctcttcaaggcagcagttctcaacctgtgggtcacaaccccattgggggttgaatgaccctttcacagggatcacatgtcatatatcctgtacagcagatacttacattacaattcacaacagtagtgaaattacagttatgaagtagcaatggaaataattttatggttgggagtcaccacaacacggggaacagtattaaagggttgcagcattaggaatgttgagaaccaccgctttaaggattggatgttgaacactgaacccaggagaaaggatgctatgcctcatccctgctcactgtctcatatgtgatctgttgtaaattaatgcagcctaccaggccctgggggtggctgaatttaccatcctaatctgaatcaactacctttaaaatgtgttatctgttagtgccattatagaaagccttttaaaccagtttccataggtcttacctcctgcagtccccctctgcccttatggggcttacatatgacttccttccaatatatagaatacagcaaaaaggtcaggaagtcagttccaagaatagaacatgaaagactatggctctcttgttgggtctctggcagtcttggcttgcccacagtgatgaacttagctccttcagaatttatgatgacctcaggccagtatttatcaagaaaactaggtctttaatgcaacagctcacgaagaagtaactcttgcaacaccccttgcaagcatatagaagaagacccttctgcaagaagtcttgagatgactgtgtctaagccagtgcctcagttaccactttatgagggaccataaactggcatctcaattgtgtggatgaactgtgaaggagaaagccttgcctagactctagctctgtaaacctgagataatagcactgtgttttaagctgctgagttggtggtcatttgctcattagctccctagctataaataactgatatggtggtgtccaacatagtgatttttctttcagtcagagattatgcattccccagaagtctgatgaattaataacatagctccagttgacaccactacctagtgatgtcagcgcacaacacacacctcacatttgtgatgaggctggtgtaaacactgtactacgagttaaacaaaagtgtagcctagggctggcaagatgtctccatagacacagatgcttgctgtaaagccctataatctgggttcaatctccaggacccacatggtgacagtagagagcagactcatacaagttgtcctctgacctctacaagtatcccgtgacaggagagtcctcccacaaaatacataagcagtgtaataaaaaccagcacagcctccacaactatgcatagtatttatgaagcaatcgtgacaatgagcagtttatgtattacagcactgctcattatattttgctgcatattccctttgcttataaaaatgtgtgctgtaaaactaagtagcgtagtgctgcagtggcctcagccagtgtgtttatgcatctcttgactgcatcaggaggctgagtggctgtcctgccctgtctggatttgtgtaagcacattctctgacattcaaacagtgatggaatggctctgtggtggggttctccaaacacgttcccctgtcagccactcatgttgacgtaatgacagaatcagaaatagattatggactttttgccttctcttcctggctcagcacactgatcttcatggtggctttgagccccatgcgaggactgtcaaaagtccatgctcttgtagtcagagtagaaagggccctcatctgttggctgaacaaaatacttcacaggcattaagatggatcctgtttgtcaaagctcagagcagggcagttttaacaggaacacactcactccattgttaggtgcaatactattctcattttccagagcgattttaaagttaccttcataggaaatgtgtccctggttccactgctcatagcaataccgggggctgggggtggagaagtagaaggcagagccactcagataaccatggtatgtctgggcctgtcatgggtgtcagacatgaacatcaggcgcagggccacatcccacctctgaagccctcaccatcctcctttgtcatcactgtgattcccctgccagccttggcttgatagaaggccagcccttctctcctgccaccttctgaggtcttgaacaattccctccctttgtttgtctgacttctgccaagtgtggcttcatcttgctccccagagctgtctcctttcctggatgatataaatgtagctctccagcctttgttctgatcttgccctgaaatccacctgctataacttgccctcatgtcttgcacactggtacaaatacacactctcccctgcatggtgaagggtcttgggaagtagcctggaaaactgtgataaaaatttcatctgagaaggaaaaatggggacatccttagtcttcagtaaatgcagggaaacatgttgggaggttcacaaagacactgtcatctggaagggtatttggctattgtctttctttctttctttctctctttctctcttaagatagaatgttctgataaaatgagcctattagatgttgtcatcatatgcttgatcaagatctcgatctcagtctctgtctcatgctggatcaagatcccttttggtgtatctctttgtttttgtttctctatatatctgtatcagtttctgtctctctgtacctctgtatctttgtctctctcttgtttttgttttgttttgtttctctctcccagtgttttactagttgtgctccacctaggggtgaagagagagcatgggcctaggcctgggcctgggtactaggtctacccttgcctcagggtgccttcagggctcctgtgcaaacttttgtcttttttgaagtctttataagcataggacagccatgttcccttcccaccccctgaacttccagcctgtaggacttcatttgggagacattccttgggttgttttgtttcactacaaatataacccaaggcagaatcattgaattctacgcttgtcttgttttcctagaggcaccttcaagagtgagtttgttttatttgtgatttgcaaagctttatcttctatgattccaaagcttgatttcagttctgtcttcctttctcccaactacttgatctttctcttttagaggtttgaaaatgaaatcactctaggacattagcttaatgtgcattgcgagcaccaggggctcacttatactgcagcagcaaggctctcagcactgcaaactatgaaacacagtttcattataagtaagaagcaataagtgaaattcacatttatgcatttggcttggacttcaagagttagaaagtgggttttttgttgttgttgtttgttttgtttttgtttgagtgttttggttttggttttggttttggttttttgttttttgttttttcaggacagggtttctctgaagctttggagcctgtcctggagctcactctgtagaccaagctatccttgagctcacacagatctacctgtttctgcctcctgagtgctgggattaaagatgtgtgccaccaccacctgcctagaaagtgttttttgcttcatgcttatatcaaagcatgctcattccagctgttattacgcaaaagatgtccaccttcgggtatttgtttgatgctgggggtggaggccaatgtttaatgtcaggtaatcactctccattacagataatctcacttaaaccagagctcactatttggctagacgaggttttgctgtttgctgcagcttctggagatgaagcatgaaccacaaaactcaacaaaacccatgtggagtttattggggaaagggagcaaagggaggggtaggtgttgtgcaaccaggaacagagatggaagggagaaggggaggacaggtgggaggcacttgcttaaaagggaaagcttacacatgcgtacagagtccttatgcagccacgtgatgcatgatgtaaccaagcaacacagggccctttgagccgtctaattatctgcctgaatgccaatgtgcataccctgccagttttcagggggcgtagtcagcataatgccaggatatcaacagaggtggccagcttgttccacagatcccctgcctctggctctcgagtgctggaattccaggtgggccattgtgcttaagatctgaactccagtctttatgcttgccacacaaatgcgctacccactgttctatctttccacccctcctttgattttttttgaggtggtctctcattgggacttggggctcagtggctgggctagactggctggccagtgacccctagggttcctcctatgtccagctccctagctctgaaattgcacatctgcaccaccatgcccacatgttttcatggctgatgtgatgaagcttgggccctcacgctggtgtaacaagcacacaagtactttaccaatgagcttttccccagctccagtttctgtatttttagcaagggtcctgagttccttggacctgatgtggctcctctttgagagcctgcctatactctttccttcctgtctcctggctcttcgacttcaattgttttcattgcctttttgttgttgttgtttgtttttctgcttgctctgagaaactgatatgttgtaagaaccaaaacattccttagaatgccaaatcacagtattttagagcagtggttctcaacaggcctaatgctgctacactttaatacagttcctcgtgttgtggtgactccagcaataaaattattttcaccgctacttcataactataattttgctactgctgtaaatcctaatgtaaatatctatgttttctgatggtcttaggcgacccctgtgaaagggttgtttgattaagggggccataacctacaggttgagaactactgttttatagctacaaatggcttggcctggtcttctggacttacctgtcttggtttttagcagaggatggtgttttgcagctggcctcagctgggttatcttcatttccaactgggtaccaggaagaagtaggtggtagatgaagaggccagggatgacatgcactgaatgtggtctgagctgaagtaaagagaaacaaaggtggacagaggttatgtactgaattatcttcctttatattcatatattgaagctatagaatgtgagtgtatttggagaccacatcttcaaaggggtgaggttaaaaatcatccctaattcaatctcacggatgtccatcacacacacacacacacacacacacacacacacacacacacaagagagagagagagagaggagagagagagagagagagccacagccataggaagaaaaagaaggaagtgatgacctctaagctaagagcatggtactctgcactaacccttgacttccgtcctccaagactgacgggaatttaatcctgctctttaaggcacgcagttgtggtatgtttctatagaagccataatagtctgacactgaggtcaatgtgagactagagataagaggcaagggagcacagtgaaggatgaggatgagtgggacaaaacacaggtccagcctctgaggagccatcaggtacaggttacagacagtcctgcaagaggcaggaggcaggaggcagactcagccaaccacactgccatgcttcctctaaccaggtcaaccacctcttaacagtcaatgcattagctaggaattcatccatgcactaacgtactgatgaagctcaagtttccatggtcccatggtctttcaatagtgccatcagctgtggggcaagctgtttgtcttttactctttggattctttattctttggggcgggtgggagtgggggtggagaggcttccaccaaactcccagataaatcacacatggaagctttttattacttacaaacgcctgaccttagcttggcttgtttctagccagcttttcttaacttaaattatcccaactaccttttccttctgggctttttccttttcttacttcacttttcctccttggctagctgtgtagccaggtgactgactgctgatgtcttcctctccttgttctagcttgctcctctctttcagatttctcctattgattttttctggctgcgagccccacccatcctttctcctggctcactactggccatgcaactctttatcagatcatcaggtattttagacaggcaaagaatcacagcttcacagagttaaacaaatgcagcataaacaaaagcaacacaccttaacatcactaaacaaatgttccagagcataaacaaatgtaacacaccttaaaataatattctacagcaccaacccttcaacacagtagcttttggtgtcattgtatatccaaaccatagcagcttgataatgtcaaatagaagtgccaaggacgttcatatacattgttctacatgcattgccttgagctgccagcattctggacttggcctgtatgaaatggacacttttcattatcatttccaagatggacaaaaagatacacagaatgacaaaagggcttctctgaatctacggaaactataatctacttgagtgtccaagctccaggaactcatcacccctgtgtggtaaagaccctttcatgtttgtcttgatccatgaggtgagatgtgacagaatcttgctgtgaaaccactgctttatttatgactgtattttgaacacagtttcggttttaactagctggagtcaaagagcccttatgagttgcagctctagctctgagattaagcactatagcaaagtggctattaaaatagaattacataaaatctttgactcagcattccctttcctgggacttcatcttttggaaataaaaggacaagtcacataaaatgcactgttaagaatgattaatgtagatttgtttatggtgtgggggggcataaagagaaaaagtggatgtcagtcattggaaaatagataaaccaagtagttatatgaaaacaatagactattatacagccattaaaatgatgatctaggtgcatatgacatagctggaaagaattccacaaagtattgtgcagtgaaaaacagaaggttcaggtaagtgtatataacaggagccttgtttacatgctgaggacaaaatcctttatttcacattccataaccacaaaaaaaggtgttaaataatactagcaaacaaattcaaattttaaacaaacataaaatcttaaaaatacttttttaaaaaaattgctgccaaatattgttggctaatgtctatcatgagaggaaatagttcagtcatcacccccaaaactagtggtattcttaatgagaagccctaaatctttcaaataaaatcagagctgtaatttgatattgcactacaagttctaacctagatgtgggagacagagaaagaaaccagaactatcaggatagagagaatggaatcactaatcatggtcacaatgatcatatgcccagaggaaagaagagctaactgctacgattccacaatcaaaaacagtactcagagtgtgagggcaaagaggcaatgacaacagtagctttcatacacacattcatatgtgccatcatctaagagaccatcacatgactgtagcaaccaccacaggcataagaataagcaggcataagaataagcagaagccacagggcttttaaagaaattttactctataagagctaaaaagactttaaagggatagaatttccataagctactttaaatgtaatcttgaataaaaaacaaaaaacaatatattttataagaaactggacaatatcagtcttaagttccatggataataaatcagatcaccaggaaatacctgaaaaaaaaaagaacaccagtggccaagaaaattatatgctagaaattatggtatgaaatgatagtgaaaaagtgtccatttcacacaggccaagtccagaatgctggcagctaaaggcaatgcatctagaacaatgtatatgaatgtccttggcactatgaaaatagtatgctaagaatatatgagcagacttatgaaatggaacagaaagcccttaaaaatatgtctatacagagatctgaagtcagtgtatgacaaagaaaatatcccagtcagtggtgaaactattcagtatatggttctggagaaactggaacctcacctacataaatgggtgcatgggttagtgcaaatggtaggattgtttctaaatgataattatttaaatatagaaaatcaaactatgagagttagctaaacacactggagaattctcaccttggagtaattgggattttaataactgtgctcatttagatatctcagaaaaaaagggacttgtaaattcaactttaaaaaatagagatctcagaaatagcaagagcattgcagagcaagagggcagatgaggagttacacctgggagactggcagaagtcaaggcaaaaagccaccagcagagagatgagagaaagagctacagagaacagaagccaagatgaagtcatctggtgcccagtaacaccaaacttctcagggtgagttctacctgctgggaagcctgagtatacactctgtgattaagagtcagagagatggaccctgctgctgctagaacctaaatccaatggaattatctgggaaaagcaagtggagcatagcagactgcagtcacagccccagaaagggggcacggtagtggaaagtcagagctgtgtaacacctactcctcacccttgcccggatgaacgagagatgaagcacaggctgcatggctggaacttggaacagaccccagtcacacaggttgtggagatagaagctaaagaatcctaagggggtttggtcctgaaagacccccaatgtcctactctgattccgccccccattcccaggcttcaatgagcactatgggatggcaggaagcttcttgctgaccttgattcagtaccctgatggactcaggaaagataaacacagtaggcaagtcctccacacccactcacaacttcagtgacaggatacccggcagagaccagttgactcccaatgcactagtcaggattgtaatttgtaactaggaggtataagccagggaattctggccgagggtaggcttcaaccacgaaattgctgactctggaaggctacctgacataacttgtaccacaccctctttgggaactgattgaaaaacaaacaaacaaaaaaagaccacaaagggagaaagagaaaaagatgtcttcctgatcaggaaaaatactgggatcacaggtttgtttgtgttgtttgttttagtttttccattttacttcatcttattgctcaatttttacttttttgttttttttatttttaatttaattatttacacttttgtactttgattattccatcgctgtgttttaacttgtctgtaactggaaacagctcttaagcctgcactttctttgcactaatattaaatattttgtgtatgcattagaattcctaagccatacactttccttccttttcttactttgcctcttcttcttccatccataaattctactcactttacttattgatacctttagccctataaaaactatatactatattttccccaaccagtagcaccctgtagtcaacacagggaatgctgtcaaatctgtcaaagtgttatatttgttcttgcagttggatcccagataataagtctaagtcaacccaactccccataggattcacataaaatcaaacaaaatcagtgggaatggaagggacaaaactggaggtcacatctatcaatgcacccatgtaaaacacaacaaaggaacacaaaaaacatgagacagcaatacactattagacctttgcaagctcatgacttctcaatgctggaaaacgaaggcaatgagatatctgagatgccagaaaaggatttcagcttttaccaaagaccaaagaccatataaaggactcaattaagaagataaagaaaatgaggacatgaatgcaggtcccagacaagaacattggaagtgaattggaaaaatgaaagggataatgtcaaggaaattgagtttccaaaaagaatcaaacacaaattctggaaataagttaacctaccaattaaaaagcacaatctagagcatcatgaacacacaagaacaagatgaataatgaattccaggaatggtagacaaggttagacaattatgaattcagacatctatacattaaaaaattaattgacatgaaaacttccaagaactctaggacatgttcaagagactaaactaagaattcacagggtaaaggaaggagatcaaagtaaagagatttaggcaagttattcaaggagattatagccaagaattttccaagccagagtaagcaatcaatatccaaatgcatgaagtatttagaaccccagacaaacatgatggcctaacatatacatgaaaaacataaagaaacaatactcaaagttttaagagaagaagcattaactcacacccaaaggcaaataaatcagaacaccatcagatctttcactggccatcctaaaagccaaaatcttttaattaaagcaaatgatgatatatttcaagcccagaaagtatataaataactagcaaccaagactgcatatccagcaatgttgtctctcaatgctggtagagaaataaaacatttcaaagcgaagacatcaaggcaatttataacaaacaagccaacattgcagaaaattcttgaatgtttattatacacaaaagaaagactcatctgtaagaacaagggaaacaatggtttttgagaggaagagataaacagaggacatcttggaaggaacctaccatgtacaaataccaccatgtcagacataccaacagacctctagtactaccacgggaaggggataaaactaccaacttaaccaagcagagaaacagccaatgaaatcataggaaatagtaaggtcctctcaataatggccttaaatgggaatagtctcaactcaacagtttaaagacgaaaattaactgactggattataaataagatccaactatatgctgtcaccaagaaacagacccagctagcataaacatccatagcaatgagaaccaacagatagaaatcaacttcccaagcaaaagaaaaccataaacaagctggcatagagattcttttatctgctcatgtaaacttcaaatcatgagaaacaaagaaggccactccatattactctagggaacaactcaagaaaatatagaaattgtaaatttttatgcacagtatgtttgagctctcaacttcatgaaacaaacactgaaagacatagggtaatttaagtcctgacacatgtggtggaagacctcagtattcaactcctatattggattttcaaaacaagctaggtgtggtggtagatgcctttaattccagcactcaggaggcagaggcaagcaaaactctgtaagttccagaccagcctcgtctacagagcaagttctaggacatcaagggcaaagggggaaaaattccaaaataaaaaactgggaagcaaaactcagagctaaaactatgctatgggtgaactggatttaacaaatacctacagacctatatactactctgctaacacatagagattcctctcagcaatgcatagagccttctctaaaactgatcacattatagaccacaaaggaagccttaaaatcacaaaaagacactgggtggtggtgatacactcctttaatcccagaacttgagaggcagaggcaggtggatctctgtgagtttgaggctagtctgagctacagagcaagtttctggacagccatggctatatagagaaatctcttctagattgacagttataggtgctcacatgaaaaaatcagaggcctgaacaaatttgataatgcacctaaagcttctaagagacaagaagccaaacccaaagccaatagaggacaaggaataataatgatcagtgtggaaatgaatgaaatagagactaaaagaacaatacacagattcagtgggagagttagttctttgaaaaggttaatatgaaaaacctctagacaaacttgtggaaagatgaagaagacccaaataagtaaaattagggatgaaaatggaattgttactacagacagtagagaatccagatcagtagcgaataccatgaaatttaaagttttatgttccaaatccctgggaaaattttgaaattcacattgcattagtcaggttgaagggcatctaggttgtttctaagttcgggctattacaaataatgctgctatgaacatagttgaacaagtgtcctgtggtatgattgaatatccactgggtacacgcccacagagagctgacctaagttcatgggagttcatggactctggatgggcagatagggagcctgcatgggactgaagtaggtcctctgcatatgggtgacagttgtgtgacttggcctgtttgtggggccctagaagtgggaccagattctatctctggtgcatgagctggatttttggatcccattccctatggtgggatgccttgctcagccttgatggggaatgtactgtgtatgtttatcttatgattgttgaataaagttctgtttggccaatgaaacagcaagttagagaggactaggagtcaaagaggattctgggaaatgtagtagggaagtggtgatccaggcaggaagtgacatagcaaggagactcatatttaagcaaaggaaacaggaagtgtccccttttccccttcctcctccagcagcaccatgtgagccaccggcaagagagggtgccagtgaaaggcatcctctataagataagtcttataaaatatataggtttatgataattaagactgagctaacagatgaggaatcctagtcattggccaagcagcatttaaaacctaatacaagtctctctgtgcattaatttgggccctaactcgggtgggcagctggcgtttagcacacatgtggcaatgggtctcaggtggcttttggcggaaagatttatcgtaacacagccttgatgcgggggtggggtgggggtgggggtgggggtgggggtgtgggggggagtcttgatcctgcctgaacttaatgtgccagactttattaactccctatctgagggatggatagagggtggagtggggaggccataagagaggagggagggggactgtggctggtatgtaaaatgaatgagaaatttaaaataaaaaaagaatatcataaattgtgataagtggttttcatcccagagttgtaagtttggttcaacagatgcaaatcagtaaatgtaattcatcaaataaatagatttaggataaatcagatgatcatcttggtagatgcagaaaagatatttgataaacttccttataataaaattcagagaaattaggaatagattgaacatgtctctatataatgaagactatatatgaccaacttatggccacattatattaaatggaaaaaatagagtatttactataaaactagagtaaaacaagaatgcccttctttccacttaatcaatatagtatctgaaatgttaattagaacaataggacaataggaagatataaaagggatatttgtagaaagaagtttcatcatgtttactttcagaggacatgattctatacctagtagacttcatcagaaaccctctaaatataataaatactttcagtaaggttttagaatacaaaatcaacatacagtaattaacagcttttctttatgtcaataataaacttgctaagaaagaactaatttcttttctaatgaaaaacatatcatctcacagtagtttttttttttttatttggaataaacctaaccaaagagactaagacctctacaatgaacacattaagatacttaatagggaaatggaaggagatcctgcacattaaaaagacctaccatactcctggattctcacaaacagtattgtgaaaatcattgtattaccagaaataatctcaagatttagtacattctcaatcaaaattccaatgaaattcttcacaaaattagaggaaacaagtctaaagtccagatgaaaagaaaagacacaaatagatgaggaaactcaagtggaaagaacactgctaaagataatatagtacttaatctcaaggtatactacagagccatagtgaccaaaaaagcatggtactggcacacaaatggacatgtaagtctatggaacataatagaaagcaactcacaggactgtggccacctaagttttgacaaaagtgccaaaaacacacacagaaaaagtctattcaataaatgatagcaaaattggttttgccaaagggaggatagtgaaattaaatccatagctctctcactgcaaaaacatcaattaaaaaaggattacatcaggccaattgttccctgttcaggaacaaggaacaagggagagcacatagaccccagatgctgtcaaggaggccagtacaagactgatccagatccctgaacatggatgtcaataaggaggcctctgcactccagggagcctctggtggtggattagtatttttccctggtgcaagaagggattttgagagtccatcccatgtgaagggttacactttggccctggacacatggggaagggcccaggaccagcacaggaaaatttggtggacttcgcagagccctcgttgagggccctaccctgcccagggagtggtgggtggatggggtgggggtaggctgggggtgggggaggagggatgggggtgaggggagggagagggagagggacttacatgtgaaacaagcttgttccctaacttgaactaataaataaattttaaaaaaaaggatcacatctctcaatttaagatgcaaaacgttgaaactaaactacttgaggaaagcagaacagccactccaagatgtaggtatagacaaagactccatgaactggacctcaagaattgacaaatgagatcacatgtgatttacaggcaaaagaagctatccaaagagtgaacacatgacctaagaatgaaagagcagcttcagttaagagggtaataactaaaatatataaagaactgtaacattttaaacaccaaaataataaaactgtctatttgtaaatggactaatgaactgacacatagttctcaaaagatgaaacacaaataccaataaatatttttaaagtgctctaaaaactggtaattgaaatgtgagctaatataaccattttaaagcacttttatgacatttattaataaatttcaaaatatacaggtgacactgcccagtgttttacatatatcagggcagtttaaatcccattaagccataccaggtaggcactattattattctcattatgagattaataatggtaaaatttgagttgatctggctgtcatctggacagctagcaattttcagaactgaaattgttgtcaatgaaacctgacttaggtggctcactttaccaccacgttgtgctgcctttccacttacatatacagatatactagctaagatctgtgcatgaagatataaattaccatggtacttatcctaggaaatatctttatagtctgtaaaagtataatttacttgtagtaacttgtacaaatctcaagcatttatctcagtgaataggtcagataaatactcccatgatcaagttaatggttatttcagtgccccagtagactcctacatgtttcttctttaccagtgacaacccagaggcaatgactgtccaacttccattgacacagatcaatttggcctattaaagaactttatatagctttgtatttttttggtttttcaagagagggtttctttgtgtagcctgggatgtcctagaacttgctctgtagaccaggctggccccctcctaagtgctaggattaaaggtgtgttccaccaccatttggtgtatagttttaataagtactctattataactgattctttaaacttggtgtttgaaaaaagaagtgtttcacatctttggccatcaggaaagtgcaagtaaaactattttagattccatggctgctatcaagaatacgaatgacaacaaatggtggcaagatcttggggaaagaggaactcttacttgctcttggtgagagtataaacttgtgcatccactataaaaatcagtatggaagtttcctaataaactaaaagcagaacaatcacatgcccctgctgtaccactcttggaaatatacacagaggacttcatacactaccacagagttccttgcacatccttattgactactgctttattcactatagctaggaaatgaatcagcctggatgtctattaacagaggactggatgaagaaaaatacacacgcgcgcgcacacacacacacacacacacacacacacagagagagagagagagagagagagagagagaggagagagagagagagagaggacagaaacagagagacagacacagagagagtcagagacagagacagagacagggagatctgttggagcagcatgatatatcaaaagagaagagacaaactaggaagggctactagcaggtcaaatcacagccatctagctccctgattcaggaagggacatgaacaaagggtgcaaagagatctgtgctgaaaaaggaccattccttccattccttccacatattaaaaacatacccaacctctttcattcttttaaaaagataagtaattcaaactacctgtttttccatgtattgttagattggcaaaactccaaatgtttggcaaagtaaaataaaagccaactgtatttggcagagacgcagagaaacaagggttcacaaacgttgccaatgaaaggagaaactggcacatgaccatggggatcaagggctgtgtgtgctaagggcaccgtgtctggttcagcactacagcccacagatgtgttggtagttggaggtaaagagtcatcgtccgcatgaggagttactccacccagcatgtttcaaagaaccaaaatttgaaaacaagccaaaacgttatcaagcaagagccattccataagttccagattttgatcttagaaattaatgaaataaaatatgatgcaggtattaaaatgaattaaaggttctttaggctctggttgcaaagatttccaccatatggtcaaatggggggaagcaagctgtagggggttgtgtatatgctggcatcagtataaaaaggagaaacaaatcctcatatgtataaaagccctccagggggagtcacagtagattaataaccatggttaccattcaaaagccaactttgctctttgaggtatgggaatatattacctattcaaacattaaacagataaatacttgttttgcaaaaatttttgcattaatttatttcttgccgtcagcatttttcatttctatcataaaaaagtgatttatatttgaggaaaaaaggtaacatttgagttcgggttttgaagttaaactaagtgcctttaaattctgtttctgctttgagtagctgtgtgcccatggggaaggcaccgaacccctgaagcctcaattctaaagtgtaaggtacctgtacctcctggattgttgtgagaatggaaagtgctgggcctggactcagacttcaagggacatcacttattacctgccccttccagggttctaatggagaggaatatacaagacaagctacctagagctacccttgcagcctggtgcttatgaataatcatgtgctcctgcttctccagtctctggattgcccacctaatgagaagcctcattgatggccagtgttccctatcttctcagcacagtctcacaaccatttttcttgacagtgtgtcatcaaaaaagaaagaaaaactggctgctataagtagtgataaatgaccggttattcacgcacctcacactgcccggctctccctattgtcaacctgcagctgctgagctggaggacagtggagctgttctcatggctgacttctgttgtggtcagatcttactgtgaattaacagttctacccagaaatctaaaacttctaagtgactagaatttagaaggcatgagaaatgcgtgtctatgtttccacgtctcctcccctacttacatgagtacttgaattgaatctagaaataatcactcacaagtcatttgccattaattaatatagccaatagttactaggtgcctgcttatatttgtcactgtgcctggcatgaaggaagatgaatcaaagttatgatgactttaaaaatgaatgacacaaaggaaaaatccgaatgaaaaaaaaagaaacattaattccaggccttttcatttagaattttcctatgtataagattattatagtaataatttacacaataaaatggagacagggaaggcaagcctacttgtagagagcgaatttcaaacatttttgaaatgcacattgcattattcataaataatgcatgctgttgttaatcacgcttgtcttcagtataggatatctaagaatgtttactgtgcaatacttcataaacatagtttaattaacatttgcagatataaatctccctttcaaataagataatctataattgaagtctcattagagcctggaggaggggctttggggagatgcctcgtttgtctcatagcccttctccatcagtaccactcttctgtttgataggcaatgcagccagggctcaaacagagatggggcacactcagatcttcatcaactgtaaacagccacagaccaggactatttgctacagagcacatgctctttgcccctttgccctggtgcctcatttcccccttgtcctttgcattaggcattagggagatcataggccaagattggacataatcatggttgttgcacagaataccagttcctggccacagtagcacctactttttgccatggcctcctcaagtaaagagttggaaaagagtttaagcttggagttggagggatgactcagtggtaaagaacattgatcttccagaggacttggcattgattcccaacactcacatggcagcctacaaccatctgtaagagatctaatactctcttctggcctctgtaggcaccaggcattcatgtgatgcacaaacatccaggtaggcaaaacacccataaacataaataataacaatattttcataaagaaataaagctcttccaaggaggtgctaggggttgcaggagagagttctacttgttagggctttgtaaataaccactccatccacagtatctgaaaattcaagagtgtcattatttcactcccaaggctcacctgacctagccttcaggaatctcttcccttgatggcccctaggttctcctgacaaggttgtttcaaatgaagtttggttgacagtgcctgttttagatcctcactagtttttcatgtggacaccaattaagttggaaattctactacagtacctggaaggagtttctaggttgtccatgccagtctgcatcgttctttgcaccctcttccatgatcgctataattcttctagcatgaaggagcttccagttggtctggcagaaaaactaggggaagaactcagtagcacagggtcttggcactgtagagcctggaatatgtgtaggtccttctgactctgagaagtaaatggttgacaggtgggtcagaaggagatgtcttcgggaatgatggagtctctccagagttttgtctgtttcttcacactatctgtgaactttgactgaagaacaagtcacatggggaaccttcagaggcacatgccacagaactcaagggaaagttccagctttccgtaagcagactggcaacaggcaggcacagcggtgtgtggtgaaggctagtccttgggatggtgttctcttttctccacggacccacttcaaggtcgattacagatgcacttctgtggcgcaatgaacataataaaaccttgagataagcccatatttctgaatagaaggatgagaaaaattggcacatattgtacacagaacatggaggcaacccttgccattttcctttccctttttgtcccttatttatctgtgaaagcagatgcaaaaggcccatgcttgtagcttgtagaagagcagtaaaccatgctgccaggagccaacagtattatcacagaggagacaatgaaaagaaagattccccagattctcatctgactcaatacaattcccaggctcgccccaaatgcacatgtgcagagcatacagtgagctgcaccggccttaggaagtgagctgcttcccacgggccatgtaggagcagcacatccaaatagccaaaactgaaaactggatcacactggaccctgctgcctgaagtggcaggacaggctcatggcctgctcaggaaacaaagcaaaggctgttttcttcagaagatttgaatatgacctagagcctcatggcaaatgagactcgcacacaaaactccaaagtactcagtatttgtatactgagtgaggcaaagctattctcaaataaaaggagatgccagctccaagttggcccgatgttcgaattaaagcagtcattctcatgaaatcactgatttaggaggctgaagatacagtaggatgattgccaaaacatgtgtgaggtcctgagtccaattcccaacactacaaaataacaacaactacaacaaaacatttagaagaaaaaaacaagaaatccacaaggtagagcatgttcagaggcagataaaagagaattgaatagagtgatctctctctctctctctctctctctctctctctctctctctcttctctctcctctctctctctctccctccctccctcccctccccttgtatctcattggtcaaaatgttccctcttggaaatgaactcatcttgagtttttcttgtgttactcagctcacttggcaaataagagagtatgtcctatatcagaggcctgaagactgttccatagaacaatggtggtaaaatgtagggcttttgtgccatggtttcttccacagctgcccatttctaccattacagcatccaagcaaacatgctccttgctcaaataagtgtgcatggctgtgctccagtgagactccctctccccaaatgggcagcaagctaaattccaaccacaggtcctagcttgctgactcttgttttatggagtaacacttcatccaagtcaagaagtggcaaagggctccaaaaatttcaggataatggaggtcatgatgaaagcagtgaggcctgtaattatgaatcaattttcatctctcttaccataaataatgtacattgatcctaggcagtgttgcagaaccttatgccaatggatgaagcattctgtatgcccaacacagatggcagagacactgtgaataaggaggccaagtcattgccctctccagagtgagagggatccagaacaccaaggctattgcagagtatctggttgatctctcaagggtggtaccatatggaggtgggtcacagctgttgattggttggctttcagcagtagctgcacagtccttagcaggagagaaggtgtataggactttggcaaagcttccatttctgctgcacagccattgtcttgttttgtctacaatagaaacaccaggatgacccttagaagctgatggcgatgtacagcatatggtattctggccgttgatagatttcttggcagttgatgcattttaaagatttattttagccgatacaggtggtaagaatcaaactcagattctgtaaaaatcatcatgtattcttaactgccgagccatccctccactcccctcatctccattgattttttttttaatttttgatgggcattaatatcaaagtcagagatgcatatcatctgtggcctttcttagagctccatggcatacctcttcctcagacccccttagtcactgatttccagtcttgttcttttcagtcccttcctgtccattactataaatctacatacctttaccttcaagctgcctttccctacatatgaaatgataatgggtctactcttgacagctctgctcatggggagggtttcccttcacactttccctcagggtgacacccaagtggcactgtaacactacagctgtccatttcccacccacactgacgttaggtgcctactagaaaccatctacacaccaggaatagtgtagcacaaaaactaaaagattcagagacagatactgatgtttaagcttcaagctgaagatcagaaaagcaaagcagccaagccagtagatcttacctctacccaactaaaatggcaatcctgtctccacaaatcctcagaggcaaaaggcatgcagatcctgtctcctcctcctcctcctcctcctcctcctcctcctcttcctcctcttcttcctcctcctcctcctcctcctccttttattccattctccacccagccatatcactcctgtatctacctacctcccttgttttgggattaaaagcatgtgatcccaggtgctgagatcacctttgtgggagctgtttcttttaggactggaccaatttcatgtagtcggtgtggccttgatctaacagagatctatctacctcttgatcctgagtccagggattaaaagtgtgtaccaccactgcctgatctctatagcttgaggctggcattgctttctgaatcctcaggaaagcttcaataaatcataaataatatatcaccacagaatagtttgacaaactttgaatgtctcttctcagaaccaagtggtaacttttcagataccccatactttgttcaagccactgataactttctggaactgtagctcatagggcctgggcctattgaagaactcagatattccaggttacctttgaagtcttctgagtcaacccataaatgcactgttttaaaaaaaaaacaagctgtaaatgtaggatataatctctctaaaagggggcacaaatgtgcttcttccttaatgaacataagaggtataaaaaaaaccctcaccttttccattgtaatgaaagccctgctgtgttattaaccattggaactctgaaaacttcaagcatagagtctttgtattccatttccaaccaagggcttttgtatttcatactagggtgagtaaaaaatatctccatctctagttcatccagtttagataacacaatgccaacaatatattgcaccaatatgatactccgtacaatgtgacattctttcagatggtcatagtctcgtgaagaccatgttaaaacttgggtgtagacagtaaacatatactgttagcctctttctgtaatgacctgatgccttccatttctcctcctactatatcccaagaggaatgcatttcctagatccataagagtaaaatatacaccaaaggctatgtagaaatcctccaacagatattcgattaccttaccagttatagttgagacaacttctgagaaaagtttgtatcactctacttccctgtgaactgtgtatcctattagccatcaccatatacaatatttcagatccatcacaacagaatataaaacaagttccaggcatgcttgccagagcattgactctaaagtcagagtgagttccctatgtcaataaactcttccctaaccaaaatatgttctgcgcccccaccctccatattctaatacctctagcatctattcttgtacctcctgttcattttggtcttctaaataacttcaatcaggcacaataatttcattgccaggtagactgctcttttaccaaaagaagagtttgaactttcttccttgagctgagctaacccctgactatttattggcctggaagcaatgagaagtggtgagtaggatactgtcagcaataaaccccatctgttaaggtatttgtttcccatggaatcattatcattatatggtaactgagtagggtagactgttctctagcaaatgaggaagtagaaatccatgtgaggtgtgttctaggaccacccctagaaatgtccacattccatgcttcaaggcatcactctttgtatatcaggctattttcacataggagagccagccactctgtacataaaaccactacccttttcaaaggactttgtaatgagagtcagccctattttggcgaaatttatactaataaaatacaacagctattcgatctccaaaccccttcccttctgtgtgtggtttgtttagtcaacctcaggcaaaaactcaactacttgtaatcctgttgtatgttcatggatattgacaaccatcatactattcttgccttctgataagtaagcaaatcttattggaggtctgttttctaaaccacttcagaaaccaactatgtgaacccaactttctcagaaagcaaaatctactccaaagcccatgtattaatatgtcttcaagtccaagacaatcagaacactgaaaagcagcattggtacacagggataaaaagctgtcaaaggtgacccactgccacctggacactagttcttaatgagctgtgatgatacctggccactcaggaggctcagccactcagtcttgttggcctcctctgtacaacctggtctttgggccattgtagcaaaagaaactgatggtgatgacttcaaattgttccaaaaagcctcttctgggctgtccttattggtcttttcaaggtgtgcttggaaaactctgcaatgtatacttagtcagaaaatggaagtgacatagaaactacatgttctagctgattgtccttggtcagtgggtactaagaggctcatgagaagtcagtttgctgtgagagtggtttaggtggagtaatgtagccaaattactggatgacagttgagaccaaagaatctgacaaggtgcaattatattttgtgtctacaagagggaaaaacaaggtggtgcggcctttgggagttggatggatcacaaggactcagacttaatcagtgggtagaaacttagcttcacgggctattgagggtttgtagaagcttaattggagaaagtaggggtatgcttttcaagggtgtgctttgtccctagatcttttcctctcttactctttgctttccagctgccagagtatgaacatctttgatctgtcatgcattctgaccaggacaatctgtcttgttacagactcatagtgataggaccaagtgaccctggactgaagctatgagcaaaacaaagctttctgccttctaaattgcttctcttgggtgttttgtcatagcatcagaaagctaaacacactgactaattcccactcaaacttctagggaaagctgtgtttccctgctctctgttcctcgttccaggatgggtaaggctaccccatcttactccatatattatgctgcacagacaccaactatactcatctgtctcccagatgtgctgaatacatcccaaggatagacactattttgtactactgtgtgcacactcagcaaacagcacagtgctactgtgtaatagagactcaagtgtgtgtttgttgaatggagtaaaatgagcacaacagggctgaaaataaagctccttttttataacactccattgtgccagttaattgaagcattgtgcagcgttttacgcatttttcaatgccagtctctcctctcctgctgtttgtcaaattgaagtggcatattcaggtgataaaaagaactccccttgggcagaacctaaatataaacattctaaaatactctttttgcttacatctgctcctctagtcaagtgaactttgcacaaatcctcaagttttgcatgcttctccattttcccagagttcatccatcaaggaagtagggcctccactaggaaagttattcatttcctttgctcttcatggagatgtaaatcgggtcataaggaaaagtcattggaaatttgattgctcagtgggctcatgcattctgtgtgctgtgtggatggatctcagcaacacctgtcttctcttcccttgtgtcactgggataaaaggcactgtgcttacagatttctttgtcaaacccagtctcactgaattgtgttaaggaaatattaaatgaagactgaatgccaggtaagaagagcaccatgacatcatcatctagacccaaagcagtcatggtatctgtcccatttccacacatttcccctgagaggagggaatggttgtcttactactcatgcatggttcatggtccaataagtagcgtaagtcctacttgggaccttgtttgcaattttgccaccctggctcctgtcccacacttacggaatcagaactcagagtttggcaagattcctccatggttatatgtactttataatttgagaaacactcatctgggccccaaatgttctttattgctccatctggtaactagacatgtagctctgctgatgccattgccatctatcactttgagaacagtaaacactctttgagccgtgaagtatagagccaccattattctttgctctggaggcaatagtttactgaaggagaaatgaaatcacagtgtctctaaggatctcagggtccagtccttctgtggacatctctattagtaattatgggtggtggctagccaggttgctaagatacactgccagtttacggtgaagtgataattcaagatgctacatacctcaaaaggttcccagtgtcctgaggtgtgagctccagctggtatcccattcatagccctccacctagataaaatagtgagagacaggagacagtatgtttctgggctggctgaagttcctcaaggtactttcccatcacaaatagatggactctgctgcccttacctccctttgcctctgcttcctcctggagtcttatcttcatggtctttcctttcttccctgcttttcactactcctagcatcactttggaccaatcattggagatgctgagatgtcgcctgtcttactcatcattttaccttctcttggtaggttattttgtcccatgttgttctactgagtataaaaaaaaaatggaatattccataaacctaggaaaaagaagcttgacacttcctggaaaagaaagtttaggtaaaacactctttcatccttgtgtcatgaagatgaaagtccatccttatgttttaagggactatgagccagcttattcttttccacaagaactgttaaaaaaagaaaagaatgttttccaatttttttcagactccaaattgttcagtgtcacctgagtgaatatttgaactaatttttaaacactttcctgctctgggcatacttaggacctccatgtatacatgggatcctctttgagattaaaagcagatacaaaaatgactaccacagcctatataaaatagctagtttaccacatatacatcaggatctctattctgaccaaatactgtcctgggttctgagaataaggtcttctctaagagtccactattatatcatgtggaaatatggcagctgattgcatacagagaactatgtgaaacaggaggaaggtcagctaactgagtcaaaaagagccaaagatggtggggaaggagaaggactgttgactaggaggtgacctggacgttgagtcacggaataggatgctccagttatttcagatggtgactgtaagagttcagtgcacacacaagcatttcatgcaaatcaacacacaggttgatgatgtcaatcagtcaggatcatgacctcaaatttccattgagaaaacagaagtccataaggggagagtgactgctaagtcacatacttgctccatcagaagctaggaccaggatgtagaatgctttctgataattgtgctgacctgaagggtaactatgagactgagtacagttgctttacctgtaaatccagtgtagagaactcaaaaatgtatattagcttcataagagaaattgtgaggcacaaagtctatctttaggggaaaaaaaaacaaaaacccaaggatggggaaacaggtccaggaaaacattaaatccaatgtcagtgtaataaagtaagttttgtctatttcttaatcccctaagactccaatgttatcattatttatttttaaaattgaattcatttgcagtatgcatgcatgttgaagaataatttaaactaaattcccagagtatttcatcccctagaacagttgtcaacatgggtcactggctttaagaccttcaggaagagatggaacccaatcctatcaataaggttatttatcctctttcactagataagaagatttttgaatcattagcaaattaataatctttcaagccaggctttggtagacaaaatgaatttctgaattccttgagctcctaccaatctggggctactccactgattcctgggagttctttgaactgtgagcaggaaaatccactttagagctgctgtaaataaaatcttggccacacaagaaagatgaagaaatttgacctttctaagtctacagagttgtgggaaaaagttagaggccaggagaaatctagcatcatagatactcatgtgatgctgccgttcatctctggggagaatcttgagtgaccccagagctaaggttgtgttctctggccttcactagaacctctgttggcagctgtgttctttgagaatggccctttcctcagttgggacctggtgagcactaaggattggtcacaagtagacacctgtcagcagatgggtcagcactaggagacagaagcagtgagaacaggttgcccaagggaaggccccttggctctgctgacccttgggggggtgatgaggcaagacttggaagcttgcagcatagaccagagagtggtcatggagtacttagaggatggccagccaacctggaaacaaatgccaagggtacgaaagtcaaggctagccatgagcttaagaggaggctatggacaaacaagatcatcaaaggtgtcaatcctgagagcatatcatgccaggcctacagatgacagtgcctaggacagttgtctatcacttctacaacacctccaccctgtattccactcctctacttagcagaaatggtcccaaggttttaccttcacccagaagacatcttgatagcagaaggtgggaattattctatttgatgtagcatgaatattaaaaacccagagacagatattgggattcaagatgaagatcagaaaagcaaattagccaaccactagagagttcttacctctaccaagactcagaccaaaaggggcaatcctgtcctcagtgtgactgcaaactgcactgttctccaccaaacctcagactgcaatgctcctatttcactctgccttatattcctctctactgctgggattaaaggtgtgggatcccaagtgctgagactacctttgtgtgagctctgtttctcttttagacaggtttgatttcatgtagctcaaggtggcattgaactaacagagatctgtctgcctctgtcttccaagtgctgggattataggtgtgtgccaccattgcctggcctctatgaccaactagtgtggctgcacactgatcttcaggcaaacttcatttgttagatcataaagaaaatatcaccaaaatttgagaattaaattaaaataaaaataattgttttcttatggagacactggtaactgtcaagttttgccccactccctatgtcaagccttgctatctagcagagcttagaaacatgacaggaagaatgacaatcatatcagttaaacacataaagaagcttttattttttataacttggttatttgcttgtttttgtcagcatagtgaagtatgtattcagttaaaactctgttctataggttgattcatggctcttagccctgaagacaaacagctcttaaaatagcctgttgtcatttgtcagagattactagaagtcctttactttccaggtaaagagaggagtggggagtgatggctcagagagaagacacttgaggacagttatagtgggtgaattggggctgggggctgtctgggaaaccagctcattaagaaacatgcctatgttcacagaggaatctggggacaaagaagctttaaaactccccctgggaaccccaagcggctacaagaagacatgtgaaccccacttatacatactgtaggccaagcacaggtatccagatggcagcaccaccaagcccagaccacagcagttcttaacctggagggggcagtcttgagcacacgtcctctttcaccaggtgcgctctaaccaatggtttcagttcttatcatgttgggcaggaaattttcggcactgagccctgccctaacacctgatccacaaaatccaaaaagaacataaggtggcagttgctttgaagtagttaagctttggggtaaagcaatacgaaactaataaagtagaaactatgacagtgtggtcagaaagaaatgatctcagattctagggtatctggggtgatagaaatgagggttaaatagtgttgaggttagccagaccacaggcaagtgagaggcatgaagaaggcactcttagcagagggaggagagcaagaaggctgtggaagtggaacaggaagaaacacatctgagcttgtcagagggacatggtgacagcaggattgcaggcactgtggtcaaaaggcatctcagaaacagactggccaacagcaggaaggcatggcattagaggcactgctgttgactattataaattgctacaagaggtcctaaggggaaggctatgcttctgtttttcttcagcaccctactcttatccatccactagactatgtcatgaggataaccaactaggttcactggttcggcctcaagcctttgtgttgcccttctccagtaatggcgtcctaaactgtgggttaaatacatctcagtccctgatgttctggttatggatgaaacccgaaacctacctacacctcaaagtttcttgaagggacccagttcaccctgggattgagtctctgcagtatgcatacctggtggagtatacagtgtgcacagcttgtagaggtgcattgctgaaatgttcctactcatagctattcctgtccagcgttcagaatgacccagctcaagcacagccattctgctcatgcatattttttcaacatatattcttggaggatgctattgtattaggcacatttcaaacttggagccaacagcacagcccctgaacccacaatatgtttttctaatattggaaaccaaatggtaaacagataaagataagtaagcaaaggccgctgtagaagctatgagaaagaagctagcacagggaaacaaagtgacggggaggtgggaacagttgatgatggttgtggaaaccttgcaggttggcaggtctgtatctagagttgggacggagtcagaggaaagctctcctaggcagaacacacagctagggccaatatacaggagctgaacaacattcactgttggaagaatgtggcagtgtggtgcagtgagtggaagagtaagaagcagagtgggtcaggcagctgtgaaggtgactgtggagcctaagcagtttgggttttaagtattgtgtgttatagatgtttacaaagtagagtcagagataggttgataataaacggtagtttattggtgaaaagtactcacgaaaggaagccagtgaccaggtttgcacctgagcagggctgagcaggacagacccagataatgcttcctagtcagctcagccaggcaaaagagagcagagtgcctccttcttaaacccttgttatgtaactctgaccacaccgtgtggtcagcggtacctctaacaggatttctccctacagtgtgtgggggtgggttatggatgaattcatattcatatttgaatagactttcagtgatatcagcagcagtgttaaagttctctggaatccaatcaagggatgacaaacctttctgtagaagctagaaaggagctaccccaggctttggagcaggttagctgttgtgacagcccttcaactctgtctcctgaaaggatataagcaatggcatgagtagcatgcagggctgaagaccgctgtgccccttagaagtgttcacaaaaacaagcccaggggtcatggattgcagagccagatttgacaatggggtatgtgaagggaaagagaagagtatgacattcaggaatgagaaggctagtgtgtccacaagcagtgtggtgactgatctgtgttcagtgagggaatctggagagttctaagatccaaggccctacgctctgaaaaggaggggggcacagtgaagagaaggacacaagggacgaattaccacagctctgctctgggatttcatgcattcatgtgtcttcctccaggctggtagccatagcaaacacaggctctggtacacaggactggtgttttttggattttttgagggtttttttgttgttttttttttttttcttgtggatctgagacttaaaaattggagggacctcttcaaaatgaatataaattacaagtaaaaagttaggagctggactttagaagaagaaagtatcacaagtgtcgggcccggagcacacatgtgattagctcctgggtaaatccacctaggtctatatatgtccttcttacccatctgagagcaccaacctgagcctcctcggtttcagtcagactgtatccaggaaagcctcctggagtgacatctggcacatgcctggtattcagactcctgaaacaggagtagaacatctgctcccagtaaatctgggtggctgctgtgtctctaccagagagtaggtgctgcccctcctccaacctgctggccttggcaatacaacatgatcctgtcaccgcactgctggctcatgaggctgatgtctgtcctgtgtcctcacataacagatgacagatgtgcctggggctttagaggatgaaatggaaggagttttgtggactttgttgattctattttatactgacagtttcacatgtgagacccggccctttctttttctctcctgcttttgtttggttttgagatttaattataatctttctttctttcatttcctccctccaaagcctcccacagacccctcctactctccttcaaattcatggcctctttttatgttgtttttgtatgcatatgtgcatttgtatataggtacatagattctgaagcgctttgttgggaaaatgccatggcaaacccctgtggtgaggactaaggttcagggaatgtgtgggtttaggagggttggaggaaagggtttgttctgcagggtggcatggaccgaggggagagaggaaagagtgtgcgtggaaccagccgatgggaaaggccatcttctcttcagatgactccccctttgagcctgccctcttcctattgctaccaaattccccagctctatccaggacaagagaataagagaaagtaagggaagggaaaaggggaaagagaaggatagaggaaacaggaaggatgggacagggaggacttggtgctgggtgaatgtgggtttctttgcaaacagaagcagatgaactctttggtaagaacatggaggaatattccacattcctaccaaagaggtggtgagtgttgaaggaagcccagcaagggcaagaatggaagttgcttcaactccagggaactggggggtggtttagtcgtcacaagccctggattgaagttcctaatgtgaccacacctatgaaactctgagggcagcagaaagcatgaggccatcagagtccctccagatgagagcaacagccagtagccccagaatagtggtgagagtaagtagaatattcttatatgaacatcctgccccaggatgtgtgatggttttgccagatgttttctgggtaagcagtttcttgatgtggatagaactgtctgtgatctccctggagaccccaggctgagggatacgggggctgtgactggttgtgtgtctaagacttccacctgatatatccgtgaggtcacaaaccttgtttgattcattctcataactctctctattctcagtcaccctttgttcctctttgccagtgtctactctagcccctggcacaggcaatatccactgtgtgattatatgtgtaatggatgcatgaacaaagagcgcacgaataaaacactcacacagaggtcttcagcggcccacgccatccttcattcctgatcaacgccagcttcctttctgggccttcggtctctatctatctgccatgagagaattaatggtgccatcatcagttcattcctgctgacatttagaattataggatggcagagctggaagggacctgagagacagagttcaatgcccgtgatgaaagcaaacctgaggcagattccagtaaacctcatttatctgaaatccgaggaagcaggaaatgcaaatggctaaaaatcttttagctagtctctgcctctgcttttatctctaagtgtaccttgtgcgtgtgaaggcttgtatagtatatcgagcttttggctgacattattcactggaccaccacggtatcttttaagtagacattgatcttttccatttcctcaaaggtcaagtaactggctttaaccattcagctagcaagcacagtcaggttcaaaatagtctactgagtcaaggtataatgtgatatttattgccttgtaggaagctggctgtacaatgtggtatttttcacctgttagcaagctggatgcacaatgtggtatttttcacttgttaggaagctgtctgtgcaatgtggtcttcatcacctcgtaggaagcttgttgtcctatgcactccaaagaggcaggcagatagcaagggtttccttggcaagaaaccctctattgcttcaccaaccctagagtggtatatgcaggttctagactgaggtccagccagccctgatgttctcatctgctgagctgtgatggcttatgttgagtgagaaaatagaccatttcctgtggctgctctgtctacttaccacacaggtactgttctggaagtctttgagtaccagaagtcagatatctgaaattagtaacagagtcaaggcccaagacattgaatgcttttacaggacaaaagttttagaaagcaatcctacagggctgaagaccttgtggagctaaagcagggctgtttgctggatactcctaagaagagtgtgtacttctctgttctagctgccagattctttttggttttccttggcttgtgcccctccccattgtgatttcttcttctgttcttataccagactctaccccctcctgtcttctgttctaagggtctactgattacattaggcctactaggcattccagaatgacttctccatctcagagctgaatttagtcatctctgcatagcattttgttatttatatcactctttatatgccaaggaccaggcctagaatgaccactaccacaatctttacaccaaattggaagcaagctttattcaaaactgaccaggaagatggacactggccaggtccatatctaggattcccagagaatggccataattacattagacaggggtttacaaaggcaaaccccgcaagactatgtacttcctgcttttgtccaatcaggggcaagcaaacatcctgacatacttccccggctatgtaccccccacctgcatgtgatcaagcatgtcctggacagttgggataaccaaacttgtttactgaagagaaaaccacatggcttgtcactttacatgagccatccccagcactgcaggatattatctgtccttgagcaagcagggcttacaggttagagacatttttgttttatagatctcttaagtacagtaacacttaaaacacttagccctcacatgtagaatctgtgtttagcagttcatagaggagaattgtattcctttaatagttttaagtttaaccataaatatttcaatttaaatatagctcctctagtatttctaaatataaatttcatgtgcaaacagctccagtacaaaggatgctctattgaataatggggaagaaattatctgatacatctttgaggcacagagggatctcatgagtgtcctttttaattttggaggccaaagtagagagggaggaagttgggctgatatccacaagtagagatgaaatttttcagtcctagccttggaggatcaaataccttttctggaaggaatttcaaatgccagtgtattggcaatggatggtgtttggattgggaagctgcttctaacctgagattcaattctaacatatccagaggtcttaaggggcccccagtagcctctaccccagggacctgcaggaggagactcatgctgacactgaagccacaagctcatgcgtaggaatacaacagtgctggagatcagggtcgtgtctactgctgtgcccacctccctttctagactcaagggctcacagcccagttctttcacacagaggccaagctgaaatagggcctctcgggaatcatggagtccgtgaaatacacaaaagcctccactggcttgggctgccctaggaagctctatagcagaccctgtggcctgagctggccattagttactgaggaaaagaacaaaagcctgtatgaggaccccaggaggaatcctccacaggatgaagagctttgaagggaagctgaggttctgctgtagaaaaacaaagtatatttgaggcagaatcatattttaatatagttaacaggagtcttttaactgtctctctctctctttttttattcattatcctgtaactccataacaagctcgggcttcagggagtcattgtcatggtgaatttgtgtgagtgcaacagagagaaaaaaggctttcattttcaaaagcctagacctaagactacctactgaaaggttcaggcattatgctggcctggccctgttacctggcagaatccactcaggcagtaccctggtcagccaagggttccatgggaactaaatctgcatgcagatgcaaaggacccctttaaaagacagactccctaatcccagcactccggaggcagaggcaggcagatctctgtgagttggaggccagcctgttctccagagcgagtgccatgataggctccaaagctatacagagaaaccctgtctcgaaaaaccaaaaaaaaaaaaaaaaaaaaaaaaaaaaaagacagactcctgcccacttactctctttcttcccagcggtcccccccccccccccgtgtgtgtgtgtgtgtgtgtgtgtgtgtgtcctctccactaattctcttactctctgccctgctctgttcttccatttccctctctccctgtctggctttcccgccctggtaataaattctatgattaatacacccattatgtgctatagttcgcattccttcgtttcgcttcttttctttttatctttctaatttttaaacttttacaaaagagtaacacctactacataaacaacaggctagaggtacagcctggtgagttagaagaggcctccattctagactagaagacaatccctgaactggggatacactggtggccatgctaggtagagatacagggaaggacaagactgagtgtgtagtatggatttgtggaggagacacacaggtgtgttctgcactgacctgctactaacctgggagataattagtggtaatcccacaaatgggaggagaaagaccactgacccaaatcatcatgatcaaattaattaaaacaagcttttttatttgtgtacatggccagccttcctctaaggtgaggttcaagaggtcagcattggatgtgggaagataaggtttttatagctctggggtagggagtttccaaatgggggatttggcaggaaagtaggtagagttacagaagcaaaatgtaacaggtggtagcagcaataggtggtcgtaataaccttttgaaacaaagggaggcttgtgagatactcacagcaacttcctgaaacaaaggcatggtttcaacttttgaaataaaggcatgtttgccatttcctggaacaggcagttcagaaccatttgtaattaaggttacaggtggggcatagcccaatctttgagaagtggagatttaatcataatcaaaaatgagccttgtttgtctttataatatggttttcaaacctaagatggaggcaggatggtttgtcagtggcatcttcagttatattgagaaaaatctgagcaccaaaaggctatgagccttgtgttcctaggcgacaccccaggaaaagggccaggctctagcaagagactctgtgtggaatgttgcctaattgaacctggcatgtcaccattgtctcactgtggtcagcctggtgcggggtccacagaagccacctgctctacacaggaccttattagcagacatgaggggtaagccagtgactgcctcatgggcagagagagtaccagtaaaatgtggtgtgtcgggatgctggtttgatgagatgacaatgtggaacaacttcctttcatactttgaagaccctcccctaaatgacaaattaccacagggaaaggaagattcccaaaatagtctatgattcagcctatgttattttggcataaagagaacttgaaataaaaatggaattgttcatttgcacaaaattaaaacagcctcatcttgttcactttgagttagggaaccattctttgctttctgagtatcccacagatgtgttgcaggtggccaaaagttactggcatatgtaacgtgacacctccatctataacgtggcataataaatatgtaatgtgaattttatatgtctattatatatgttacacttattatatataataagatgccattttgttgaacacttaggtcccacacagggaaaatgaattattcatataaaatatgcttttatctgaccatcagcattttcgtattgctagtgcaaatgaaaatgtcctcactgagggtctgaaaaggtcacagaactaagactgtattttcacattgtattggccagaactgaaaggggtaagtcagaatattatatgtgaattttttattactgaagatttgaatacccctgagatgcataagttaatagccatccatgctatgtaccttcaaaaactggacagaagtgaaagatgttgagaaaaatgataggtttagggctggagagatgactctggttaagagtatgtactgctcttgcagaagacctgagttcggctcacaactacctataaccctacctccagggaatttgacaccttcttctagcatccttgggtacctttatacatgtgaacacacacacacacacacacacacacacacactttaaaaaaatctagccaagaggtagtggtgcacacctttaatcccagaatttaggaggcagaggcaagcaaatctcagttctaggccggcctggtctacaaagcaagactcaggatgaccaaggatacacagataaaggctgtctcatctcaaaaaaacaagcaaacaaacaaataaacaaaaaaaccctgtgtgtgtgtgtgtgtgtgtgtgtgtgtgtgtgtgtgtgtgtgtgtgtagttataaaaaggaaaaatgacagattgtcaggtaaaattttgaacataccctaagtatgggaacagagtacaacaagacttcaagttcccacccctcatcccagcttcagttaactgccacgatgaaatatgggattttaaaatggaaagcacttcactttcaaattgaagagatggagttgtggggtattggagagtacacagtagctttctattgtcacatccatgaccttttgggttctctgaaatgagtgaaagcgtatactagccaatattcaacgctcaatagctagtgtattctatagtccacctatgtgaggtaaataggtgagtacccaatcctagtgactgattcctctgtcaagaagttccagctttaagttacttatgtgcagggctgcaatgacggggattaactgaagcagtgacgtgaaaggggtctttgcccagtcataagtgcatggggccaagtcctcactgaccatcctttctcctgtccatggggctgtattgcttacatgcactggtctctagcttctgctaatccccagagccccagacatgctgcataacagtttgctcattcatcacatcccactgagagtgcagacatggtcgtggaggcatggccaactccttatgcattcccacgtccacttgacggtcagtgttcctgtgtgtaggaagtgggaccacgaagctgagataatgaaggtccgaaaaagccagagtcttccgtagagagtggtgtagtctcgtggcatcatctctaaatgcttgctttctctatttacattgaaacaatgagctccaactgaatatggagatgactccagagaacatttgggctgccactgagtgacgttaccagaccctcttcactctgggattctgggggatccttcagtgggcaaatgctagcccatagatgtttccatatgaccctcagaagctgattctgtacaggcattacctcatcctttagatactatctaatgacatttgcatggtagagagttatctacagaaaagtaagcagcaggagagttgctctcatggggatttgaccctatccttgcaccttccatgtcttccctaataatatatccacatgtccaatgagatgttataggatgttgtggacagtgattccttgtttttaagaaataaattagtcactgtatgggtgtagttatgctgtggaaacaggattcaacaagaagacaaaggaaggctgaaagctagtgacttggaagaattacattacagagtgtctcatggagccataggagaccctgggggtgactcatagacatgaccagttctcagcctaaactgcctgagattctaacccatgatttatctctaaagaggcagcttccaacctagtgcttcctcacaacccaagagtccatggctttctctcctgtggctgccagctcttggatgctagaaactgtataagggatgacacagacagttctctccttccagccactgcccaaatctagagagtactgcagtagttggaagcatcttttctagaggcagaggatgctgagcatcccgatctgagccatagtccaatttatcttcctgtctctggttaccaagaaagatcctattgcagagtcttcatcgtggggagtgtgggagctctatggcttaggtacttaaggctgctgaataagaatggagttactgaggtcacatcagagaactctgacctacattctactatggccacaatgcttgtgttaccctgaaagttaaaaccatatagggaaaaatctttcattcttctaatttttttcttttttttttttttgttttgttttgctttttgggacatggtttccttttgtagccttggctgtcctggaactcactctgcagaccaggctggccttgaactcacagagatccacatgcttctgcctcctgagtgctgagattaaaggccatcactatccaactcaatcttctatttaaaaattacacaaatgtgtcattctgttaatttttgaaaatatcaatgcttattgcaatttctctatctcttcatcatttcttcatctttaatgttcagaagcatcagcatgtgaaattggtcttttcagcagctcaaaaattttgcctaacctttacaaattcattggaggcctggtgtcaggaataaggcatagtttcataagccattggtttattcacattctagattttatttcagttctctagtccccatcaagaaatcatataataaactgtgtgcccttggaatggcattgaggaattcaaggccatggatgaatcattatgcctctacaaacatccccaatgtgcaagtaacagagacaagggcaacttgacttttcagttatcttggaaaactcaattcttctggaaattataataggtaattgaaatacacagatatatgtataaatcactgaaaatacataatagtaaatgaaatgtttttatacttcagatatggtgttcataatcagctttaccttaaagcataatatgccaggggctgcgtgagtatgagcattgctcgtagtttctttgatgtcctctgtattttagacatcattgttcatttaattttaggacctgtgctttgttggttgagtacatggttcatgcacccattctaaacagtgatggggcagtgtatacagataaccagtgctccttggtactcttgactagtgtcttagtaagggttctgttgctgtgaagagacaccatgaccacagcaactcttataaaggaaaacatttaaatggggctggcttatagtttcagaggtttagtcccttatcatcatagttgaaaatatggcagcctgtgggaagatatgatgctggagaaggagctaaaagttctatatccacaggcagcaggaagagactgtgacacaccagccaggcttgagcatctgagacctccaagcccaccccccagtgacacacttcctccaacaaaggccacacctcctaatagtgccactccctatgagcctattgggccattttctttcaagatatcataaatagcttcttcctgtgttccacttcaggcattttctgtggttcttggaggggagaaaccacatgactttctatggacaataagtttctagaaaaaacatgcacttataggccagcctttaactgttggcataagatctcaaaagctctcttttcttttactatgctaattaggaaagttctagacatttcctgctctgtcagcatagatcttggagttgaggatgatccagaacataaaaaagagagtaaaattccatcctattagccactgaaaaactttccctgtaacatatgtgattccatgttgctgagtagcatataccgactgttttagagtaagcacttaaccccctaagtattctaccttttctattgagatgttttaatttcctttgtggttggtcatgtaacatcacactgatgtcaatgacaagcttttacacagctgtgaataactctatacacaatatttctgtacacatttgactatctctcttcaagagccaattggggtcagtagcattttacatattttttaactcatgcctctgtttctcatcagcatttagaaaaggagatgaaaaatatatacaggagggtaaaggtagtaagtagctgttacttttggtaactcagatggaatctgaaagtcaaccaggtgctcgcctattttccttttcaaaaagaagattctaccgttcaaaacaattctgtaatctgaaatgaactccgaggtcttaataatggttttaatactcaaatccttaatctttgttttagggttttcattgctgtgaagagaaaccattaccatggaaacttttataaaggaaaaccatttaattggtggtttacatttttggaaatttagtccattatcatcatagtacaacatggtggtgttcacacagacatggtgctagagacagagctgagagtcctgcatcttgacttgcaggcaacaggaagtgctctgtgtcactgggagtaacttgagcataggagacctcacaacccatctccacagtgacacacttcctctaccaaggccacacctaatccaagaatgccatacctcttcatagtgccactccctttggggggcattttctttcaaaccaccacaatcttatatttcacaagggaacaaatgtcatgaattagggaagagtaagctagtgaaatcatatagacaaagggtcaagttccaatgctctattggtcatttgtgagatttagaagaagcagcttaattcttctatccttactccagttgctgtagaagtacgagagcaagacactgctgtgataattaaatgaagtactgtccatagactgcttagcacacaggagggtgtttggcacacttggtaggtgttaagtaaatgatgggagttgtttttatgattactgctacttgggaaactggtgaaatgtaagcacctctacggtagaaaagtcattgtaaaaagaaacaagaccagcatttgtttgactctcaagctactttcaggggcatgattgagagtcataatgtcagcatcggagcaggcagcacatcaacacaattttctacaatgaaatttcttgtttcagccagaaggtgggagcagaatggagctatagtggcactactattgcatctagaacaacacacaatttttaagcacaaaggtggagacaggctggtagagagatgatggcatgtagaatttggagacagacaggacttggctagggcctttcctcttcccagatgtacaatacagaggaaaagattcccttggcactcgtatccctcatctgctggaagctattggcattccataggggagtgtatcatccaattgaactaactgattgggctcttacactaagaacagcctacctggagtaggaatatgatgtgcactggtccctttcatgaactcataaactgggttcctatgactgcctcagtgaaatgggtgatataattgagacatggagaggaaagtgctcacacctggccagcagcagagctaggctttgaatctggaaagtttccaaaggcaaaacctttaaccactgtactgtacaacttgtggcagtagaacgccaggacaagtgttctgaacacaggtcttctaaagtaccccactcccctccccaacaggaaaatcccattgtctctctgctatagctgctgcatatcaatcaggatttcctcaaagctgtctcccttcagaagccctctcctgtctcctcagactctaacaggcatctagatactgctttgcctcaaaagcattgactcctcccttggtcccacaaggaacagctgggcctcccaggcaggacagcccaccctggagatgaggatagttatctgtgatggatcatcttgtagcaaccagcatgacagatgacagcaattaacagctaacttcttatcagaccacccaccttgcaagacaggagccgagagaatgacaggcaggcccaaaccttgactaggagtgtttaattacatggacttcttgtccctgctccaatctcttctccatttaaaagcttctatcagtaccctaaagacaaagacaagaacttgggggcattgcatccctgtatctatttctcttcctaatgcacattgattaaatcaattttctcttcgccattctttgtctctttaattggtatcctaggatagttggctggtgctagcccattgagactataggatggagcctaggcttttgtcctaacccttgggttgctagcccacttggttcccttctttggaaaccctatagcactaacaaatgcctcatatgtctgctacttggatctattgatagtcaaggaagattaaggtctttgagtcaataccattgtaaatattcaacaggaaacacacaaatttgctatttgaatgcccccccatcaatatgtgggggaaaggctcactccaacaaagcagtatgttcagttgacagggcatgtaataataagtccagtggtgtctggaaccagtggatatttctgtttgttttaggagctcctggcttggacttcatggaggctgtgatgggttactttcagagttccaaaggagccataggaggtgctggctctctgacacagcagttcctcatagttctcctgagattcagaactccatcataccatctcacactagttgttagggactggacctatgcaatgagaatagttagcggcctccacggggttcctgaatccaggattagagaatagcattccctaagaccatgtttccaggtcctatcaaattggtgatagtctggagtaagacacagaataattgatttcaaagtggtgtgtgtgtgtgtgtgtgtgtgtgtgtgagagagagagagagagagagagagagagagagagagagagagagagagagagagagcagagacagagacagagacagagagacagagacagagtcctgtcaagtctggtggctgtaacaaaacagcacattttgttgctttttttggatgtgggtagagtggggtggggtgagctggtgttccaagatcaaggtgctggctgacttgattcttaggaaagcccttttctcatcttgcaagccagctgtcttcttgctgtgtcttcacatggggtcttccccccttcagatgtacgtatgctaacagcttcctgctctttgtgggttctaggcaccccatcatctcctgtctgttaccttgaaccagaatttctcagtgtcaacaccagacatttgtttgctcagagcactgtaggttgtttaacagggttcctggtctgtgttcactgtgtgccatatgtcacctagatacatagcaaccgggcatgtaatgatcaatcatagtaatatgtgaagcctggctttcactttaacaatgaaaacgttatttcatgatcactaagttgaagatttaagggatgacagagggcatgcaagtgtttattgaatacactgtctatattttgctgcacttttcagatataacttttaatattagtttaatgctattttatataatttatataatagagccatgtgatgctgcagtgttttaggtggctcaaaagatgtcaaagattacagtgtcatgcagttcagtgtagtagcccttctgttctaatgttgctcaagaaatttaaaaacaagtgttcatatgttaaatgtcatcttatattttttgttcctgtttgtgttttgttttgctttgctgtggttcagagtctcatgatgagggaaagactgacctagatacatcatgtagtgcaagttgcctttggactcatagtgtttctcttgcctcagcctcctgagtgctaggatcataagcatgtgtcactgttcttgtctaaacatcagcttaaatgatattttaatgaccctattactgttttcttaatcaagaacatcctttggggacaatgtccttccaatgcctgtttcactttttttttaaggtcaacaaagtggttttttactttattagtgaaaaaaaaatttatgcttctgatttgggttcccctgccctaatcggggaaaccagactccagagtgtctgctcatgggatccaaacttggccagtgggctcaaggacacccagagactgccaaggccccagtaacagtgccgcctccatccaggagaagaggacagacatcaaagtaatgaaactgtttgcatctaccagaaagaaaccttggtcccatacccaccaggagaggaagagactcctgatacacccaccagaagaaaggatgggaagaagacaatataaaagcacattcaacagcagaaaaaccaatatgacaccaccagagactagggaccatacaccagcaagaccagaatatcacaatgcagatggaacagaagagaatgaccttaaaaacatcttcatgaaaatgatagagagcctcaaagaggatatgagaaaatcccttaaagaaatgaagaaaaaacaaaccaaaaattacaagatatcaataaatctttcaaagaaacacttcaaaacccaaaaactgaaatagagacaataaacaaagcacaatctgaaggaatgctggaaatagaaaagctggataaacaatcaggaaatacagatgcaagcataatcaacagaatgctagagatggaagagagaatctcaggcattgaagatacactagaagaaatagactcatcaaccaaagaaaatcttaaatccaacaaatccctaacacgaaatatccaggaaatatcggataccgtgaaaaaaccaaacctaagaataataggtatagaagatggtgaagaaatctaactcaaaggcacagaaaacatattcaacaaaatcatagaagaaaactatcccaacctaaagaaagacatgccaatgaaagtacaagaagcctacagaacaccaaatagactgaaccaaaaaaaaggtctcctcgacacataataatcaaaacaccaaacatacagaataaagagaaaatggtaagagcagcaaaggaaaaaggtcaagtaacatataaagacaaacctatcagaattacacctgacttttccatggaaactctgaaagccagaaggtcctggatagatactctaactacactaagagatcacagatgccaacccagactactatacccagcaaagctttaaatcaatatagatggagaaaacaagatattccatgacaaaaccagattcaaacaatacatatgcaccaatccagccctacagaaagttctggaaggaaaactacaacccaaggaagttaactacaaccagaaaaatataagcaataaatattcccactttaccaacagccaaaaggaaaaagggatagaattccacacataattgcacaaccaccaccaaatccaaaacaagcaagaatgaacaatcaatggtcattaatatccctcaacattaatggtcttaacacgcctataaaaagacacaattagcagaatgaataagaagacagaatccatcattctgctgcatacaaaaaacacacctcaacttcaaagacagacggtacctaagaattaaaggttgggaaaagattttccaatcaaatgaacccaagaaacaagcaggggtagcaatcttaatgtccaacaaattggattttaaactaaaatcaatcaaaagagataaaagaggtcacttcctactcatcacaggagaaatccattaggatgaagtctcaattctgaacatttatgccccaaatacaaaggcatccatgtttgtaaaagaaacattactaaaactcaaatcacacacaaaaccacacacacttttagtgggagacttcaacaccccactctcaccactggacaggaacaccagacagaaacttaacaaagaaacaaaggaactgatagatgttatggcacaattggacttaacagatatctatagaacattccatccaaatacaaaacaatataccttcttctcagtgccacatggaaccatctctaaaattgaccacatacttggcaacatagcaaacctcaataggtacaaaatattgaaataactccctgtatcttatcagaccaccatgctttaaagttagaattcaacaacaactcaaatttcagaaaacttacaaactcatagaaattaagtaacacccaattgcacaattcatgggtccaagaagaaataaaaaaaaagaaattaaagatttcctagaattcaatgagaatgcggacacaacatatccaaacttatgggacactttgaaagcagtgctaagaggaaagttcatagcacgaagagcccacatgaagaaacaggagaataatcacactagagaattaacagcacaactggaagctttaggacacaaagaagccaatacaccatggaggagcagacaccaggaaataatcaaattgagggctgaaatcaataaaatggaaactaggagaacaatacaaagaatcaatataatgaagagttggttctttgagaaaatcaacaagctagacaaacctttatccaaacttaccaaacatgaaaatcaataaaatcaggaatgaaaagggggacataacaacagacacagaggaaatccagagaatcatcaggtcatactttgaaaacctatattcttcaaaattcgaaaatctaaaggaaatggacaattttctggacagatttcacttaccaaaattaaatcaagaacagataagcaacttaaatagacctataaccactaatgaaatagaagcagtgatcagaagtctctcaaccaaaaaaagcccagggccagatggcctcagtgcagaattctaccagaaattcaaggaataggcaataccaattctcctcaaagtattccacacaatagaagcagaagtcattgccaaagtctttttaggaggccacaataaccttgatacccaagccacacaaagacacaactaaaaaagagaactacagaccaatatccctcatgaacattgatgcaaaaacactcaatacaatactggcaaatcgaatccaagaacacatcagagaaatcatccaccatgatcaagtaggcttcatcccggggatgcaaggatggtttcaacataggaaaatccatcaatgtaatccaccatataaacagactgagggggaaaaaaacacatgatcatctcagtagatgctgaaacagactttgacaaaatctaacacccctttatgaaaaaggtcttggagagatcagggataataggaacataacataataaaagcaatatacagcaagccgacagccaacatcaaattaaatggagagaaactcaatgcaattcctctaaaatcggggacaagacaaggctgtccactctctccatacctcttcaatattgtccttgaagttctagctagagcaataagacaacaaaaggagatcaaggggatacaaatcagaaaggaagaagtcaaactttcactatttgcagatgatatgatagtctacataagtgacccgaaaaactctaccagggaactcctacagctgataaacaccttcagcaaagtgtcaggatacaagtttaactcaaaagaaaaaaatctgtagccttactacatacagatgataaattcctggagaaagaaatcagagaaacatcaccctttacaattgccacaaacaacataaaataccttggggttacgctaaccaaaaaagtgaaagacctgtaccgtaagtattttgagtctctaaagaaagaaattaaagagctagaaaatggaaggatctcccatgttcttggataggtaggatcaacatagtaaaaatggcaatcttgccaaaagcaatctacagattcaatgcaatccccatcaaaatcccagtacaattcttcacagaacttgaaagaacaattctcaactttatatggaaaaacaaaagacccaggatagcaaaaaacaaccctgtacaataaaggaacttctggaggcataaccatccctgacttcaagctctattacagagctatagtcctgaaaaacagcttggtattggcataaaaatagacaggtagaccaatggaataaaggtgaaaaccccgatattaacccacacacctatgaacacctgatttttgacaaagaagctaaatttatacgatggaataaagaaaacatcttcaacaaatggtgctggtatgactagatcctggaatgtagaagactgcagatagatccatgtctattgctatgcacaaaacttaagtccaaatggatcaaagacctcaacataaacccagccacactgaacctatttgaagacaaagtaggaaatacccttgaattgattggtacaggagacagcttcctgaactttacactaatagcacagacactgagatccacaattaataaatgggacctcctgaaactgagaaacttctgtaaggctaaggacacagtcagcaagacaaaacagcagcccacagactgggaaaatatattcatcaaccccacatctgacagagggctgatctccaaaatatacaaagaactcaagaagtgagtctccaaaacatcaaacaatccaactaaaaagtggggtacagaatgaaatacacaattctcaatagaggaatctaaaatggctgaaaggtacataaaaaagttttcaacatccttagtcatcagggaaatgcaaatcaaaacaactctgagataccatcttactcctgttagaatggctaaaataaaaaacaccaatgatagtttatgctggagaggatgtggagaaaggggaacactcctccactgctggtgggagtgccaacttgtacagccactttggaaatcagtatagctgtttctcaggaaaatgggaatcagtctacctcaagatgcagcaattcctctcttaggcatatccccaaaagaagcacattcatacaacaaggacatctgttcaatgatgtccttataatgatgtaatagccagaacatggaagcatcctagatgtacctcaactgaagaatggatagagaaaatgtgatacatttatacaatggagtactactcagcaagaaaaaaaaaaaacaacggaatcttgaaaattctcaggcaaatggatggaactaaatgaagccattctgagcaagataacccaatcacaaaaatacaaacgtggtatgtactcactcatatgtggattttagacatagagtaaaggattaccagcctacaatccacactgccagagaagctagtaaacaaggaggaccctaagagagtcatacatagtcccctggagaaggggaaagggacaagatcgcctgagcaaattgggagcaagggaggtggtggggagggagctaggagaatgagaaggggaggaggaaatgagggagcagaaaggttgagtagggggagaatagaagaaaacaagaaaggatataccataatagagggagacattttaggtttacagagaaatcaggcactagggaaaggtctggagatctacaaagacaacaccaactaacaatctaagcaacagaggagaggctaccttaaatgttgtccccggataatgagattgataactgtcttatatgccatcctatagccttcatccagcagctggtggaagtagaagctgacacccacaactaatcactgaactgaactggaatccagttgcagagaagaatgagtgatgggcaaaggggtccagaccaggctggtgaaacccacagaaacagctgacctgaacaatggggagctcttggttccagactgatagctgggataccagcatgggactgattcagaccccaggaacgtgggtttcagtaaggagacatcggaaatctacgggacctcctgtagtagtgcagtacttatccctaacataggtgtggactttgggagctcattccacatacagggatactccctgagccacgacacatgggggtggttctaggccctatcccaaaggatttgatagactctgatgaccctcccctatggaagtcctccccctcccgctggggagcaaaaagggtattagggtattagtagggtattagtggggggaggttaggggaagaggtgagggagtgggaactgggatagaaaacaatcttgtttctaattcaaattaaaaaataaagaaaaaacttatttaacttccccttttttataaatctttatcttttattgccatttacaaactatgatgaagtcaacacccatcacacatttgcacattttgacaggctgaggcctatagcagagttggagtgaggaaatcagagggcctactcattttaagtcccaacagacataccaatctttactgtccagccaaagtggctgaggataccagtttcctcaaaccccagcagcactgtacattgtctggcttttaagctggaagaaagatagctcgttatagttttaatttgcagttctttaattaccagtgaagttgaacactttttcctatgtttattgaattttgcttttcttctgcagattgcttattagtttacaagcccatttctctgcagaggtgtttgtctttctcatatcagtttgcaggatctctttgtaggttctagatgcatagccttgatttattgtacatattgcagataactctgttagctacctatctttttattattattttattagttcaaattagaaacaagcttgcttcacatgtcaatcccttcttctctccctcccctcccccaaccccccaccagcacctcacatcatcccccttctccccagggagggtaaggtccttcatgggagttccccaaagtctgtcatatcatcctgggcagggcctaggccctccccccatgtgttcaggctgaaaaaacatccctccatgagggatgggctctcaaagtcccttcttacaccagggatagatactgatccactaaagtgccgaggcctcctcattgacatacacattcaggggtctggaacagtccagtgctggcctcccagacagcagtctggggtccacatgctcccccttgttcaggtcagctgtttctgtgtgtttcaccagcctgggcctgacccctttattcttcattcctccctctctgcaactgggctccagagttcagttcagtgtatatctgtgggtgtctgcctctgcttccatcagccactggatgagggctctaggatggcatagaaagcagtcatcagtctcattataggggaagggcaattagggtagcctctccattgcctatattgtcagttggtgtcatccttgtagatctctggaaatctccctagtgccagatctctcctccgacctatagtggctccctctgttatgttatctctcatcctgctctcctctattcttcccccaactcaacctttctgctcctccatttcctcctctcccctcctcgtctccccctctcattctgccagctccctctcacctaccctcatgttcccaattagctcaggagatcctgccccttccccttctccggtgtccatatgcatttttcttttagtatccttcttgtttcctagttcctttggtgatgaggattgtaggctggtaatcctttgctctgtgtctaaaattcatatatgaatgagtacataccatgtttgtctttttgtgactgggttacctcactcaggttggtttcttctagttccatccatttgcctgtgaatttcaagattccattccttttttctgctgagtagtactccattgtgtaaatgtaccacattttctctatccattcttcagttgagggtcatctaggttgcttccaggttctggctattacaaacaatgctgctataaacatagttgaacatatgtacttgttgtatgaatgtgcattatttgggtatatgcccaagagaggaattgatggatcttgaggtagactgattcccattttcctgagaaacagccatattgatttccaaagtggtgttacaagtttgcactcccacagcaatggaggagtgttcctttttctccacatcctctccagcatagactgtcattgtcacctatctttttaattttacagtagcttccatcatccccaagctatagtttgtaggagatgacatctgtcaactatcttcttaatggttgaatggttaattagcatggcttccagaatgatagaacacttgacctaacatactcaagtctgagtctgaatactcttgaactgggcatgttgggtacattgagatagtaaagtgcttttcctctattctcactgtacagtaacaaacacagatgtctttgatgacttcaaaggatgtagagatctcttcctgcaacatccattctgcagcagagacccactaatctaattcactgttgctactctcatccatccaacgggccaaggactaagtctgtaagaccttgcctgctcactctagatgccaaatccaaaccccaggttgttttatctgcacggatacaccagcttaaacagagattcctacaaaccccttcatcgggtttcattgatatactagacagtctcacagatatcaaggaaacacatttacactagatactgggaagtttagggctatagttcagttgttagaatgcacaaatagtgctctatcaggttcaattctcagccctgcataaatcagatatgatggcacttgggaggtgaaggcaaatggggttcaacatcatcctctgttatgtcaaggacaggctgggctacctacatgagaccctgtctcaaaacagaaatggaaacaaaaccctgaaagtatggataaagttgttaatagggagagatgttcaggaaggggcttggagcatccatgtcctctggggacatcaacattatcagctatgcaaaagccctttaagttttaatggattctttattgtataggtatggaggatcacgtctcctatccctagaggctggggagtagggctgaaaatactctttaattttgtttaggttttttggggacccatccaagaggtacccagggggctctcagccatcagtcaactcactagcatatagaaagatgaggccatcatgttgaagatttcaaagatttctggggctgtatgctagaaaacaaggcaaataccagatatatgtatttcacaatatcacatctgtgttttatttttctcctctcatattaatgggttattcttttgctcaagaaaacaaaatctatacttaaataaaacccaaacccagaatggaggcgtcttgtctcaaatcagacagctgagtaggtacacacatggagtcctccatgaatataaaagtttcaacaaggaaagatgagtagacagtgtgagggaagtgtgtgggacaggtccatttctttaaaagcaagctttttatactgcgtgtcctgtggtgaccctcccaatgagcagttgtttagaagttgtcagtccatgagtaaaacattatcatctattattcttgtaaatcatgaagctataccatactaataatagataacttttcaaagctcactcaggtgataaatgacaaatcaggattggaacccaggtattctggtaccaactcggctctttttcatgatctgtaatgtgtttatagagtcaaggggtgtgatctttcatgtgtggtgcatgcacgcatgatgcatacacgtgtgtgtgtgtgtgtgtgtgtgtgtgtgtgtgtgtgtgtgtgtgtgtatgcacttcttggtctctatatctgaatctctatgtctgtgtgttgctatgtgtatgtgtgcacacacatgtgtgtgcttgtctatatttctgtttctcttcatgtatgttttcctctgtgcatgagtattcacatgttcatgtgttatgggcttctgtacttttcctataaatatacacatattcatctgtctgtgaacctagaaagagaagaggagatatcagtgggacaaagtgtgcagtgcttgtgaggggaagtggcaaggtgagtatgcttgtctgaaaacaattatgatttttatggaaagaatgatcacatgttttttttttattttagacaacatatttaggaaatgagccttctagttcaaagcttgaccaccattctttaactttcttgtacatgtctcccaatagtcctcaagcactccagataaaatgagttctcagtagagcaaggccagcaatctagaaatggaaactaatttatattaataaatacaggcaaatctgggggagccaattaacgagtgagctaatgatgtggttttctgttgtgtaggggcataagtgaggtgattccatttgctttaagggaattggggtttacaagactatagtgctaatacgtatttgtcatggtcagttttggcgctgtgatcccacttggttatagaagaaatacagtaatggggggatgtcagtaatggggggaaagtataggcttgctggtcatccatctgcagaaaaagagatatgtcaagggattacccagagggccagcagagcccatccatgtctgcctgtgtgaggttataccatggagcttaggcatctaccgagaatgagaatgggtgggcaagatagggctagggaggaagaagagagcatgcacttcccatgtgccagctcaaggccttaccttgtttcatggctcctgcccttcaggacagactaattctaaaacctttgtcctcactcaggtaatgttccagcttagactccctatactcttataatgactctggtccctctctttggtactttgagatctccctgtccatgctgttgttcccacagttaatcctctagcatgagcttcagattagtctcagcagtcccaggatggtcacaacttgataacaatgaccagctgtcattcagctcattctgtctcccagatgctgtgtgaagctttacaatatgagcacatttattactccctagaacaaagagagaccattgtcacccccacttcacaggtgaagaaaaatgtgcaggataatgtaactaggttattacacttatgccagttgcccgaggtctctcagctggtgagcgacagagttggcatggattttatgctgtctggcttccagcacatgctcccactaataaatgtagtgtccatgtcaggctcagaaacatcagttaagtgcaaggacaattggcttatttcatgctgacaatgatctctcaagatgacatagctttatgagaagaccagtacggctagatagaggagagtctacactcccacccagatctatgctttgaagtccttaatgcattcagatggctaactgacttgggtcaggcccaaaggggggttggtgaacaatctctactgaatggacatttgggcaagtgaccagagaaacagactaatgacaccagagtgtgaggacccagccaggctaagagctatttcctctcttctcctttcaggagacttcacttcttatattctctccctctcttcctctcatagaatattaaatcctgggtgtgcatgtggttggaggaggggatttttcctgaagagctgcatgaaagagaatataatagggccagaaaaagcagcgtaattggggctcaagttctagtacacctcccagagctgttgtgagaattaaataggttaattcacagacaacccttaagacgatttgtagcatacgcaagtactcaaatactgctgttgttattttatacatatgtgcaacacttggacagagcaatagatggggagccaaggccccagagcttcattcccatctctttcacttaagcataatagtttctgttttcaagttaggggatgtactattcaagactcagataaccaagaagatggacagatgaggtagggcatgggtagatgaatggagaaatactttgatttatcagttgaaagatattataagtaacttagtcgtaccattgtagggggtgaaaagtcctgtaggctagcagagtagcctactcttcagagtaggatggcagaggggagacaaagaatagagttaatgcagcagtttggacctgaagacagcagaatccctagtcctgaggaggtcaggctgtttcctttaagactgtcaatggagtaagtgaggcccacccacatgatgaggtagactctgtcttactcaaagtctactgatttaaatgttaatatagttcataaagggccctcatagtaacatctagaataatgtttaaccaaatatctgaatgtcctcatgtagatatagttatatattcaattaactatcataaacagggacttagtatcaaaactatttataaggagggggagacaagatcatttggacttactggctgccagcaatgacaaaccctgtctcaagggaataatgtggaaagaaaagagaacaggatattagacatcatcctttgttctctacacaaacgcccagacatgcacctgcacatgtgtgctcatacacaccacattcacacacaggaaaaaagcatttatattaatatgttctattttaatagcataattttgaacattagactctcccctcactgtaaagaatccctgacctgtagatggccaatcatgggtatacatgacaaggtctcatgagggagctatcccaggctggtcttgaacttggcaattccttttgcctcagtctcccacctgctgggagtacagatgagtgacaccaaatccaggcgcaaatatttcaaaagattcaaagtaaagatagatattgaaatatgacaaggtcttctctgacagtaacttggcagaatacttttttaaagtgtatcttttgaagtatcagttctattttctcccataccatccttaagaataactttgtgtataagcaaaaaggcaagtgccaggctgctcattatagcattttaaggaaatgaaaacctggaaatagccaaccattaccggcagagaaaaacaagcaactaacaaaacattgaagagacactgatggctgtcaaaattaatgcatgatctacaaaaataatctgcttagaattctatgacatatagataaacaatgataaaaatgtcacttacttaaaaatcccaatttccaagtgtacattaggttataaattaaatgaaacctgtcatcctgataataactgttgcccctggagcaatgagattctcaacattcttaatgctgcaactctttaatacagttcttcatgttgtggtgacccccaaccataaaattattttcgttgctacttcataactgtagcttttctacttttattaactataatgtaaatgcaggattatatagtatgcaacccctgtgatggggtcatgacctacaggttgagaagcactgttctagagggatgagcatttatctgtaacacttcaatattgttttataataaagaaattctggtaatttgccacttaattcaagtttaatgttgaaagtaacaaatttgcaaactattctttaatgtcaagtattagagattggtcatgagccctgacatgtagccgacattaaacctacatgtaacaagcactaaaaggcttgttattgcagagtttatacagcatttccaattgaaatttatattgaaagtttaatactagatatgtacaatattagtttaatctacaacatggaacatctaatctcttggtagtatgtgactgtatttttatatgaagtcagatcctggtgatttgataagaattttctcctagtttggatactataaatagatatgagacctaattttaactcccaggataggaatttgaaacgcaaagatatattacttttttctaaaatgttagctgtgttacaaagcaatcccgaatatagtaggcaccttccctcagaattgcacaatattaaccaagggaaagcaaaggcaataatgccatgatctaataaacacagttactatgagagagctagcaaacaagtggaaatatttctctataatttcgttaaagaaatgaaagggtccgctaggcaaccaaagactagaaattatttcctgatgcttttattagactgatcaataacacatgtgccttttataaaatagaccctagctttagagagaaaatacaacagacatgacaataaaacgactttacatctgttttgattcttacatatgagtttcagttaccttcatctgggtagggaaaaaggagaaaagaatttcaagcagctatcctcattatcgggggcacctcacttaagccagtggcaggacacctgacccaggatgtagtttcctatgtgtttttatggtgatgatgtgtgtatctcccttctcccctccccttccttcaccccatccagttctccaagtctgggatccattttgtaagtgcccttttaacacattaccattcctgttcttaaacccgctggctttggcctctgccaccattgagtgtggcacaggtttaaacccatgcattgtttaacacctgctgttatggccttgaaactcataatgcgtttcttttccagtttgtgctgtgtgatgtccattggggcatgagagcatgcatccttcatcccttgttcaccttgttcacaagtagcattcaaaatacaccatgagtatccagttctgtggcctgtgatatatgggtgttcaaggggagtgagcaccgtctttgacaggtagagtaagaggcagaataagatggtcctgctttgctctaaccacaacttacttctgtctaccaagaagacaacggtgtcttactaaacacgatgaaggtcctttggggcccatgttactttcctgtattagctaactgcctaagctgaaatgtaaccaaactggttccttttcctttagtctttccttagaaacaagccaaaggcagacagtgtttgtagaatgtgcacttatgtacgggaaacaagagaagcctgtctactgctctgataagaatgaaatgtgcacacatataggactctgaaatatgaaatatggaatgtcagtgattctacatataaattaaatgcttttaagtatgttttcattgctggcatatatataaagcatatggcaaacttcataccaataatggaaattttaaatttttctttacttaaaacaatagcaaatagcaaaccaaaacactaggacaggctaagaggctgagaaaggaaggcaaagctttgtcttttagtctcacaaatgacatgttttcccatcttttcaaactatgggccccagaagtctagtctactttgtaccacactttgaaaattatgtagttagctgtgtctcaagtgtctcactgaaggtgcctctgattcctgccatggcctctttaaaaagcaactcctttttgcttttcccttctaattatttttaaactcgtggttttttctttgttttcttcatgatgtttagacttatagtttcttttcttttcttttcttttttgaaacaggttttctctgtgtagctttgtagaccaggctggccttgagtcacagagatctacctgcctctgcctcccgagtgctgggattaaaggtgtatggcaccatcgcctggctggaattataatttctatacgactgactgtagttactgctatcatagtgatttctcccaaatgtcagtttcctggagtgatgatggggaagtcatatacacagtgcagtgattctctacatgtgctctgaggactgggagcatccttatcacaatggttctgattaaaaacacaaatctgcaggagccaccataggcctctgggagtgtgaaccagcagtgtttagccagtctttcaaggggttcagatgcatgttacattgttacagtactgatgggggggtatgtactcttgaagcagctacactcacacttaagtcctgggtgggccacttaccatctatctctctgacactgagaaacccattactcgggctgagactctgaaacaaagcaaagagacttgtcataaacaaagaaggacacttgtcatacctacaaatgcttctgctttctgtcactggtaaagactaaggggaagtagtgtctgaatgcattggaagggttctgcatagagttggttataaagagtaaggcagggtcagaggtcaactcttagtcatccatgagttgatatggtgcaaaggtgctgaatgagtgaggaaagagtcccaggaggaaacccatcaatttcccagtccagtttgaactgtagctttgaagaaagcaaataaacagtaaagcctttggggtcagccttcatatcttggagactgacatatctatctcattgcaacacaggaaaaaacaaaatattattttaggtacaatgggttgactgtcctcttttgatgagctccaagcaactcatgtggcatgcaatttagtcaaatggtggaaaccaggttatggggggaaagacaaaaagagattttgtggctttatacttttatttattattttaatgttattatttgatttacaatgccaaagcaaaatgccaagttttagtaatttgaaatttccatagcataaaatggaaatgctagcatctatactgccattctacattaatcaagcaaaatataaagccaatgatttatatataaccactaaaactatgctctacaataaagtaagatggcaagttacttcaagtgtgaccatgggacatatgtcattctctcaaagttacatattaataagaagatgaaaaatatacaatttattattcaaaaactttgtacaaaatgaaagactctatcaaaactctggaaagttgcacattgaatattaaagaatcagttgaccccaaccaacagactctcagaccttgtcacagctcatgtctgctttgctacaaagcttctcagctgttgataaatggtaggcacttgagaggaaggatggagaatgaagaattataaatatttgcctccaacttatccttcttgagtgatttgtttgtgacttgttaacatggaggggtactgcttgagaaacttcctcatggtgatttgctttctgcaactgggacaccggctatatatgagcttcagagccggcattgccagcttgcctttgattcctgcagcttcatcgtatgtggatgaggtgtctaacccagagttagcagcattggtttcactcctggcatgtttatattgtgctttgaaaaagtctttgagggagagtaagaaatattctttgctctaggagcttggccttatcgattgtcattttcattctcctctggagggttatagaggtgtcgaagaatgctttctaaatgagtatagttttattggatttgaaattttaatgtcatgaataactctgggtatatcacaagtcgtaaaagattcagaactcagattttttttcagtgttgatcccatagaaaatccatgtatttttgtacttaagaagcaaattgtgaaattatttctgtaaataatataagcatcattgtgcacttactagtatcaagcacatccaattgctttttttatatatgtaaagttcctatccacttctgagtcagctcatgaagatgtgagctcaatacaaggtataggaagaacatgcttgccttccaagaacacagaaccctcctgctatgtggacacagaaccctcctgctatgtggacacagaaccttttgctatgtgggcacagagcccttctgctatgtggacacaaggagaattgatgggagtgggaagacccactgtttccattcaaagccaagaaaatatcaaagttcctgtctgctttagactcatagtcagggctgaaatgcacacagccacccacccagtcagttttggaggctgagaagcctgcatatttcagcacagcacagttaaagccagtctgggagccccatgttcacagcatggacttgggcagctcctctctgcacagtccagataatacttacatgaagcttgaaggccagctgggtctactcagagactgaggagatgggaacggggctttgtaaggtgctccacacaaaggtgccccaccacatggcctgacctctggtcctttgacctgtaggcaaatgttaagttttgcatgaagaaaataatccagtttcttcatttcatcttcctgctcagaacttgtaagcaccaacgcctgagcctgtaagcctaagactcagtttccagtggattctggtcaatgggtaggagggtaggtctagcatgtcctccttggtgagagtcctgcaattctgcagaatctctgatggcccaggaggctgagactttggttttttttcagcagaccaaataaaaaaccaacgtggagagaaagttcaggactcagggacctggtaattttccatgacatgttttcttctgagaggctggagcccatccatggctgtacacctccctggaactgtggcatgctttctgactttatgcctccataaatgcctctttcttggttgaactgataatgacttatatgtctaaaaccatagtatgaaatgaaatttaaaaaaatagaacccatatacaatttaattcaataaacatttgggtatcttttttatgtcaggcattgtattaaaacctgggatataaagatgaataaaagcctcaagtataaaaggagctcatccttgcagaggaggaaatatttacatagcgattcctgagggagaggaatggctgaagtttacactgaaaagggggtcagatacggcggcattaagctccttcctcaagaagatgacccaagctgagtcctgcagaataatcaagaccttatcagatgagaactgggaaaagtcatttggacagaaaaccctggctgtgttggtaaaacaatggatagcaacaagggttcccatgtaatttgagcagataatgaatgaccaagtgtctaagttagggtttctattgctgtgaagagacaccatagccatggcaacttttataaaggaaaagcattgaattagggtgtttcacattttcagaggtgtagtccattatcatcatggtgggacatggtggcatgcaggcagacatagtgctgaagcaagagctgagaatcctacatcttgacccataagcaataggaagtggtctaagtgtcacactgagcgaagcttgaacaaaggacacctcaaaacccacccccacaatgacacccttcctccaacaaggccacacttcctccaacaataccacatctcctaatagtgccacttcctatagactcataggggccaatttcatttaaactaccacaccaggttaaggatggtaaatgaataggaacttggctgcaaagtgcaatgtctgccaggctaaagggaagaaggccatcatgagatttcaagctgggaaaaatgtctccatagcaatggagacaactgaccatggactaaaacctctgaaaccatgagccaaagtcaatcttcccccttttaagctgcactcccagacatttttcctagcaatgtataaactaagaccactaccaatggaaacgggaagtttgatgccacaagacagaaagggaccgtcgatgaagatttttatgtttattttaaagttttttcatacagtatattttgatcatattcttcttcctccctcaacttcttccagaacccctaccttcatacccacctaactttatgttcttctctctcccaataaataattaaacccacaggggggaaaaaacacaaaaatcaaacaaacatgtaggtagaggtttctgtccttcctggtcccatatctgtttaatctcaaataaacacacagaggcttatattaatcataaactgtttggctgatggctcaagcttcttactagctagctttctctcttaattattaacccatttctactaatctgtgtatctccatggattctatggcctctttcttccttggcagctacatggcatctctctggcaacacactcactccctgcgttcctctttccagaattctcctagactggtagccttgcctatacttcctgcctggctatatcctgcctgtctattggctgaaacagcttattcatcaaccaataagaaaacacatattcacagcatacagaagaacatcccccatcacagactagaaggaaaatgtcaacaactgagattcaagatggcagcagcttccagcacctgtggaatcacagaccattccaatgagcctgaaagacccgcagagactttcagggagatttggaagtggaggatgaggctgaaaattgtgaaatatctacaaaacaacttaaaaagggcaggtcttaagggaagatgcttttaaaattagtttcatggaattggaaaaaaaagatggcaaaatggagcagacctagagacaggcaggtatggtatgtcaggtatgggaactcagctgcaggggacaaaggagcatgttgttgcagagtagaactgggccttgcgtcaccccgtttttgcccaaggcatggagtagcttctgctgctgctcctccttctattctcgattctcaccctatgctaactcagagggcagggtagtatatagcagctgcctggagctttagaaggtactgctcccccaataaacagacatgctgtacagccatatgatcaccccaacactgaatagcaataagatatctaaggccggtctctctgtaggcagaggcaggcagatctctgtgagctcaaggctagtctggtctacagagttagttccaggacatccagagcagttgcagagagaaaccatgtctcaaaagaacaagagagagagagagagagagagggagagagagagagagagagagagagagagagagagagagagagggagggaaggggagagagagatataagatgaagaacagtagaaaagttcattttctggattaagcctccttggaaaacttctgtggtctgtgctgcagacagagactgtgttgatgtgtatggtccattcttctatggacaaggaaacttcttttgcagtgatattgatgactgcagactcataactgaggatagagatgttgatggattctatgacaaccttcttccctacttaccaaaaagaaagaaggaaagaaggaaggggaaaaggaaggaaggaaggaaggaaggaaggaaggaaggaaggaaggaaggaaggaagggaaaggaaaggaaggaagaagaaagtatttcatacaggaagccattgaagagagtccttcaacaatgtgataaagatgctgaagtatagctcttcacagttgatgacttctggtggggaaggactcagttttctttaaggggctggccactgggagtttgaccatgctccagtgagtataagggcaacacaaattgggttggtggggttttgttgttgttttgtttttattggggggtgcatggacttgggaagaatggaaatcaagtgtgatcagggtgcactgcatgaaattcccaaacaatcaataaaaatattatgatggagaggtaatttcccactgtgggataggtgggagtcaacaaaaggaaaaagggataaaagaagaagaggcacaaaaagagcttaaactccagttgaacacataagttcactaatccgaacacttaagaacacacaaatttgacatcctcagcctctcaatgaagatagcagacaggagatgagatatatcccaaccattgtggccttttttcaggacaccagacctgctacaatgcttcactaactcaagacctgctacagtgcttcaccaactcagcagccacatggcctgtgtaccctgccttgctacaaatatctgggaggtggaggggtacaatggtggtccaagcaaataattttcccagaggaaggtgagggagaactctcctcaggaggaatggctgtgcacagagcctgagaggtagggtgaactaaagagaagtccataaaaataagcagaacaaggccgctctcagaggtggcactgtcttatctcttctcttagatgaaaaacaacccaagtcatgttccctctggagcagctgctgatgggagctaatttctctctgtgtcagcttttgccgtggtaactgaatgtctgacataaagacttaaagggaagaggcatttattccctagattttagtcaatcaggacaggggtacagagcagagctgggccactcatatcatgtgggagaaggaaaataggattacagacgggtcctgaacaatgaccaactccagtgatctcattccttcaggtaggccctgcctcctaatgtttacataacctcccaaaatagtgccactgtgggggggggaaccaggttttcaatacaggagctattggaaggaagcatttcaaatacaaaccatagaaattgcattttacacctttaaaagcaccacaggtctttgatttgattttttttttgaagcctcatatctaacccaccagccctgacatcatcggtttttctggtgtaatcttgagactaccctagctgagtccttccatggaactagaaaagtgtgcccgtgattggcaatgatgccctgaagaccccccactcatggtcagttacaaggaaagaaccaaggacaggcagggctaagctatctcagcaagtgacacgcatcattaggcacttcagaaagcttgctttcccatgtgtcagcctgactttgaccatgtcatgtcacaaatggcagatggcactccagaggtatgtgatatggggcccctttactgctaacaaaagcaagaatcaagaaatgaagatacttagaaaatgttcacatctaagtagaggcaagatttgaatgcggattcttttagtcttccctaattctatgttattctaaccgtcttcttacctattaacacatgacataaaaactaagatttaatttttatcctgaaataatgtgtctaaatcaactactctttgtaggctttgaagattctctaggaagccaaagccaaggcctgtgagggtccatgtccctttcttttccctaaccaccttcatcttccctttccccaagagataaaaatgttattaattttaataatatattcataatattacattaacaatgaatattaagttgctttagtaattaatacatattaaccaaattgtaggaggcatctgagtcagattgctgtctagaggaacatagtggttgtagtctctttgagtcactggtctcagatggaaacttgaccttccttgggacattggtattgtacgagagacacttaggattatcaaaccttgaaaggctgatgaatcgtgcccttcaagccagagaagtgctactctccccacaaaacaagaattgctcccatagcaaagtattatccaccccaagtatcaacagtgctgcatagagaggtcgtgggctcatcaaaacatctatcatttttctgtaagcagggaccattagagggatgaatgacttatattttgccttctggtagaatactgctggtcccaagccctgtttcatagagtttcctggatgatgtgatagacagtgaggactggtccagaaggcaggaggcatcagatctccaccagaccccaggggccactgaacagggaagcccagcatgctgagtgagcgagcttgcaggatgctgggtgcatggtgcctgtgtttcaagatgttgaggccagtatgaccatagtggaaggtgcaggggctagcactcctgagcagagcacaggggtcctgccctgccctactggtgaactgctgagccgttctttcccacagtagagccctgccctaagtaagactgtggtgactccagcaagacaatgtcttgataaacagaagggcttttatgctaactttttatcctttgttcttacaaaagcaacttctcttcactctttcttcctggggtaatttgagtccatggatggttcttgaacaccgatgagtggtatgcttgctactccaggggatacagaaaaatccatcatgagctctgggtgctgaattcagtaggggaaaaaacatttataaggatctggtggcaaaagaaattatgacacattctaaaatggggccaggagccaaaagtgacagcaatgtggaggagagatatacctaaagaattttattttaaccaggagagctttgggggagtatgctctgaattggaaggatgcgtctaggtgcccccataagccattgcttcttggtcctgcaaaagagacatcatatacctgctgttctgatgcccttgacattttaaaacttagtatatatgtgtgaatatatgaatgtaggcacacacgtgctaggagacacgtgtggaggtcagaggacaacctcagtatgaatcctcacctgttcgaggcagtctctgggatttattgccaggacacagaaaaactcttggtcctatattgaaataaactccccaagttgcctttggtcatgatgtccctcacaatagaaaactgagacaggcgacatgttccctagctaagtagtaatgaaacagggcacctgagtgagtgatgttggcatgcaatgacagacaggcttacaagatagacagtgatgtagacagtcagaaaagacttcttcccagaatcaccatgtatacctcctggagaaacagatgtgagttcaaacagcagtgacttcatactccaatctctgtttccatctgagccaccaacctcagccaaactcggtctgtgtgctctggcaaggttttctaagttaactcaggttcctggctgatttataaggattttgtcaaattgctaataccattattctgcccccatccatttcatcaacagtagtttaaactcggccatcttgaatcactcacaaacagtcccagaggtttatttggtcttatatttcttaacacaatttatagcatccaaatattgagttaaattttgggctgacattcatcaagcctactgtaatatgcccttggcttttctctcaccattcctgtcatctgtcttggcagtaaaagtgcttctgcttcttttccatgcgatccaagcaaagagaaaaaacaaaacactatttcccaggcttctgttccagcagtgcctacaggctcatctacatgacctatttaaacctccctcctctgagtatagcagaacgccattgggagtcattttattgacacaatctttagtaaaacaatagtatgtggttttaccctaggtccctggactttatagtctcaggttcctggttactcaagcagtgtcaggtatgggttccattgtgtatagtgagccttaactcaaatcagttattggttggttactcccataagccctgcacctccgttacattagcatatcttgaaggcaggacaccattgtagatcaaagtgtttgtagctgggttggtgttgatgtttctcctttgctagtgagcagagtaccttctggtactatgaacactagcactagtccataggggtaaaggctctatgtgggtatcagccaaattctccatgttcaataagttgtgtaggtgttgtcttcagcaataaggctttgctgtcatttgtggagagcaatcaatagtaaccttggaaattaacctggattttcaagggtgtccacggggcccctttggccaacaacttgattgatgcaaccaattcccagaagccttcatttggtgatgaggaatgcccagttggatctttatcccccctgttattttacagctccatttagatcaccttcatatatgcatatgttataggaagcttctgctgtattaggtttccatactatccttcaaatggcccttcattttagctatatctttctattttccctccattgtctgtttcttccctgcctccctgcttgatcctcctgttccagcctcctttactcctaacccatccatccataactatctattctatttccctttcctagaaagatctatctggcccccctcagtcccttatggtgtgcctaaactctatggttctatagattgtagattgcttatcattgacttgacagctcatatctacatataaacaatacataccatctttgtttttctgggtttgggttacctcacttggggtattttttcctagttctattcatttacctgcagttttcatatctttaacagttgaataatagtaatattttattgtgtaaatgtagacattgtgttatattcatagatcagtgccttgctcagccattgtcagagaagcttcctcctgcagcacatgggaacaaccatagactcacagccagataatatgcagagagtaagagaccttggaacattcagctctgtggaagaggaggcagaaaacgtgtagtgccagaggggatggagaacaccaaagaaacaaggccttctaaacacaacagaacatatgcacttatgaactcacagaggctgaggcaacatacacagggcctgcatcagatggggtcctagcgctaaaagaagtggatgcatgccaccatccctaacccagaggctatctccaattgataaccacttacaaatggaaatttagtctcctccaagggagtctcactggggaaacaaactactcttaggatagactgcatgcccagcagtggacggccaacagaaaatgaactcagtgtcatctttggaagccccttgtctcatgtcagggctttgccttttcttttttaaatttatattttttattttttaaattctctctctttctctaacactacaggtcctttgtatatatactatggcttccagttttgtgtttttatggaattcctgagtgtgcaaactagtgggtctctgcatctttatctgtttcttgtgcccttcttttggctcttttccttctattattttttacattatcctattccaatgtgtttattttttgctttctgttattatattttattttattatgatcccatagaagcctgtttgatatctaatgagagaaagaaagaggtagattcatatgggatgggaggtgtgaagaggaactggaaagattagagagagcagaaaatagtaatcaggatatattatatgaaaagaatctatgttcaataaaataaaaaagaaaagaaaagaaacctccattcaataaaactttgccatacactttcatttaaggatataccccaaaattaatctcttcaacctttccaaatgcatggattgctcacatgaaaggatatcaccttcccaaagccaatatcaagtttcttggacatccaagcatgtatgttttgtgggacaaacagctagactaccatgatctgctcagaaagcaatcccatctgtggggctccagcctcagagacacagctgccaggaataagagacaactgctctgtcccaagcccttgggaactctgagaggctggggtaggatctgtttcttaacaaagacatctgggatctatggaaactcccaacaaaggaagcttatcaaccaaataaggtcgaggaaagtcccagatgtgccctttgggtattttggcattagtcacttcccctgtcacaaacccccatattgtgctaacctccaagagaacaagagcccagtctctaaatgctaacaaacctgtgtttgcactgagaataccacctattgggtgttcacacaggacatttactttcccttcccactcttcttgcctgtaaaatcagagtgcccatattgtagaggccatcacatggctcagtaaatatgactgccgctcagcagctggccagctgttagggagaaccagggcacagcatggagctgggctcttagcacaacggggaaggaagttagagggctgtagaagctgcaggcggattcagcagagtccactggtacctggttgaagattgaagcaccattttcaaagactggctgccttagtcactcaagtcattgcctctctcactattcaatttcctgaaatccttcacgtcacccatctaaattgtgctcctccttccagagagtgagagcagaggagggcaggtaaaagaagacgaaaagctaaccacagcctgctacccatcaccatgagaaagtgaagtcacactcagcaatctcccctccctctctcttcttgtactatatgctctatagtacatgcatgtgtcattgtgtgggtgtctcaagagccgaagttctgttgcactgtgtatcactgagcattagtagctagtcaatggacacaaaagacaaacatccaataaatcaagtgtaaggtcaagagatgggaaggcagttgagagacaaatgtcttgcaaccagggcgtggtggtgcacacctttaatcctagtatttgggaggcagaggcagttgatctctgtgagttccaggctagcctggtctacagagtgagttctaggagaaccaggactacagaaagagaccctgtctccaaaacaaataagtatgaataaatagataaatctcatgtatttttccatggaaaagatggaacaaaaagacagaatagatgatcagccttctttgtatttgggactctgagtgggtatcacagtgtctttcctcttaatccaacttctgtgtcagtgtgataaatatttggaagagcaaaccaatgcttcccttgcactctacctccttgctgaacctgcaaggctgcatggctgaaagggcctaaggtccctagagagaacaactctcttcctagaaacttctgtgtagcctttgttctcctggtagctgaagttgaatttccagtttggagggaaattgcacagccatgtgattcagtatagtcttgctggaaccggataagtctgccttcagaagtgcacagctgccgttgaggccctagaccatagttcaccagcagagattaatagggacaaaaagccagctctatattaaggtactgtgatcccaaactcagatgactgtcacaaaaaccaggcaagttaatgtcactatctgcaacagctgggattctacaaatgccacttagcctctcctcaggggcactgtgtctccaaagccatgttgtttttgcaagactgcctgcaacttggcaccatttcagtgtgtgactatttccattcaagagttcctcatctggctcctgcccaggcagtcataccctggtgtgctaatggtgtccctacaagcagatcaggtcaccaagaacctgacacctgcctcagggctagatgggagaatagccaagcatagcaaaaggacacatggcatggtagcaaagaaataaattaaacatgtggcatgctgttggtataggcagtgacagaccccatctggatataacccatgacttggaaacagagtctgagattcaagcagcagcagaagcacagatgcagtcatttccatcccaggacagtgaatttgcagtttggctcctccagcacacttcacacttgggttgttcatcccatgaatgataacatcttttctgggacaacacaaacttccccaatgcttccccaggctcgaaagatccaatcaatctaatcacatgcttgtatcaaggggatgggtaatgagaaaagttggggaagctgtctttattctgtcttatactgcggagtttaattaaaatgtttcagagaaaagagaagaatatatggtagtggattttaattttcttccttgaataaaaatgatctattattctgccccccacacaaacaggaacgtgatttaggtttcacatttttcacaggcgatttcatgagctattgacagttccaatatatactaagccgttagtctcctctggctgagaagtggaagggtggagtgcctccccatgcccgtgggaagccaggaggatggtgcctccaacaatgctttgcctgttgaaaatgttccacaggcatttgctacattgaagtaaaacaaaagaacaaatatatccacggaggaaagaaggcagagagcaggtagaatggagtttagctgttcctatgatcctcaaggatgtttcaggcccacttgaggtcagctgaacttgaccactcagtagagtgggttctcatccttccccaccaacctctgctgtggatagaagtttctgtcccacctggtcccacagccttttagtcccaaataaacacgcaaaggcttatattaatatgaactgtttggccggtggctcaggcttcttattgtctagctctctcttaattattaacccatttctattaatttatgtatctccacatggtcttggcttactggtgatgcccagccctcttgcttcctctgcagctacatagcatctcttgcaactcattccctgtattcctcttcccagaattctcctagtctggtagccctgcctatacttcctgcctggctacatcctacctgtccattggccaaaacagccttattcatcaaccaataagagacacatatattcacagcatacagaaggacatccctcatcactctgctactgatggttttcataaggcaacaaattcagcttactagctttgtatagtcctgagcaagttatgtcccctcactaaacctcagttaccacctctgtggtatggcaataacaattgggtctctctctagtgttgtatgtccagctgattctaggtgaagccttgaacttccaccttcatcctgtgtccaaccgtgtctaggccagctgctatcagcttactaggactggttgtctgctttcttccctagtctaggttcaatggcttcattcccggaggtccaaaactaccccctgagagaatttacactttggaaattggtgaatgctacaaaatagagcattgtgcttgcttttttatttattttggagaatgggctattaaacttctgtaagaattaagtgagataatattggagggtcttagagtattgtgcatatagtaagtacttgggaattgggaattgttgccgtaattaaattattaccatattatataggatccagggctctttatttgcacatttttacatctattaaagcaggatgtatttataatcaatagcatcttccagttataattggcagcgtttttctcagtggctcctaaaatagcaactcaacaatcaatggaactgaagtcatcattcatcattgtcactctcttcatcaccatcgttattgtagcaggtcctttatgactgcccattcaattattctcaaaatatgagaaaaaacacactgaagcccttgaacctgtagtagcacccggctgactcgagggacaccttgaagggggtaaagcctccctgtctttatccctgtctgcagttggccattcttcacacctcccaagtcctcaggccaagccctcaggaatgacctagagtctctcaagtgccattctgcagtgacagcatgatggctctctaggtataggaactgaaatcttcttgcaaggggctcccacagcaagcagagtctcttcctgacactgctggttgctgcttgcaacactgctgtctgttttgttttgtttgagacagggtttctctgtgtagccccagctgtcctgtagctcactctgtacatcgggctggcctcaaactcagaggctcacctgcttctgcccctaagtgctagcagctggcattaaaaccatgggctaccactaccaggcccaaagctgcttatctttacaagtccctcctgcctggggacccatttgtctatggacgaaatggggtgggggcaggagactcaaagcacatttgttgaataagacagtgaataattaaataaatacaactagtaaatatatggtaaacatgacaattttaatataagaaatgaccaaatattatccaggatgtaataaatggcaaagtacctgactgatggaattagaaattgcttttaaaggctcttttaaaggataatttgctggtgtcctctaaaatttagtatctgcctactataatgtctaatgcttcatagaaacatttacactctagcacaaggatctctgtggctatgtcgtctctagtggcaaagcactgtaagcaacctgaatttctacaaatcaagcagatgttaaacacgccactacccacagccattctgcatgcagcagcaaggcaaaatgaagccaatctgtataaatagacatgaaaagaaatattgatgcaagcaaaataaaatactgaatgccacattatatgacgatatttacatgcttaaaatagaaaacaaagccattcttctggatcttcatttagggtcctaaatgcataagaaaaataaagccggtgacagttagaagtgggaagaaaacatggtcagggcagacttcagctttatttccatgattagattttaaggtttataatcaaaacatccatgtagtagttgtgtgattaaaattttcagaagattaaatgggcagcacagctaatggatgatgagactgaagcgtgaattcctgcagcacctctctgagagcatccctctgccagggaggggcaggatgctgctctaggtgactgccaaatgctcactgtttcaggagctttggagccaagaagagaggggaggagccccacactgctgctgttctactggcactgcctccagggccaacgtgcaggaatggtggactggctggataccaatgaccagagcatcaccccatttttccatccctgtggtacccagtgaggcagaggaagaagggtaaggaagtgagaaaattggagggggtgaggagaccagagtcagagcttacagacaaactacctggatattgtactatgagctaggccttggggtagctgagaagactttgtagctcctcctctccttttccatcccctcttgtctgaacagtgccatccctgtgggcaccaatagagtatgggattagatagtgttgcctggagttatcttggtcaccctgtaccagggataaatgggttgtgaaaaaattcacagtagggagaatacatttttccttcattagaaatcaaatactagttttgtcctttttggggcttccaagtctcatttatttcccaagattttcaaagaatgggctagggataaatttgcctgcctgtaattgtaacaccccgaagacgatgtagagttcatgacatgtctggactgtacagtgagacctcgtcactctgtcttgcttgatctctgtctgcccatccttctgtccatccaatcacatttatttagcatgaatgacaactactaatctactacagagcacctgatagagagtttccaagaaggctttgcagaaataatgagttgggaccagcaaatgtttggggaagtgaatgaagaggggatagagagaccgctgggtgcagataagctgccccaggctaaaggaaaaagaaaggctgccacaaagtttaccaactgaactcacagtgagaaaagaaagtgtgggaagcaagtctacattcagaaagcaagacctgtgctggaatcccacaggatgggtttctacagagcacaggaacgtcattaggaagactgttaggcttgttaatgaaataccaataagaacgatggcagcaagaacatcatcaatgattcagaatggctcagggaaccctgatgggggttgggggggtaagggcctggtgctttgaactcccgtaacacagaccgctcaacagtctgatgtgctcaggtgggggtgggggcactccatagacccaggaaccaagttccccaaactgggctgtttgaagcctctacctccttagccagcctgggctgttttaattaaaaacccagttccaatggctctctcatgctcaataaaaagcaactgcagactctaacttgctttcaaacaccttgtccctcttacctcagacagaccccacaaaaatcgcctgtcaggatagcagtgagcctgggacttctggggaaagaaacctgctgaggacttcaagtgctctcacactggtgaaaacaaggcctggtgggtactcagcaggtagccaggcaggtgccccacactgctggagggtctgagccagtcctcattcatcaatgttattgcaagtggtgtaatgttaagacatttgatgttgacactcagaaaaagaacctgccacttttttgccaacgaccagctggccacacaacaagagctctttgagcaatgactgtatatccctagggttagactcaaggatggcatgcacaacccccccaccaacccatgaaagagtagaagggacagcataaagtgaacaggaaaggacctcacagtcccactctgtgatttttcttttcgtcatgactttagcttctctatcttaatttccccttctgcaataatgaggtccattttttgttgtacttcattgggtactctgatattcaaggagagtgggttaaaagcaataaacataaaacatgcattaaaaaccaaaggaaaaggagttgtgacaaggtaaaaacaaaaatcaacttcagcgattgcttcttaggggagagctgggggaacaaaaggagcccagagggttagcgctttgttggaatgaaggcaaagcacactaactttcttcactctccaaggcaatgcaagtgcattggggttcctttcattgtatacccattcaagtctctgcagggttagaacttgtattttggctaaaatcaataacaccaatgacaatctatgctggagaggatgtgaagaaagaggaactctcctccattgctggtaggagtgcaaacttgtacaaccactttggaaatcagtatggtggtttctcaggaaaatgagaatcagtctacctcaagatccagcaattcctctcttgggcatatacccaaagaatgcacactcatacaataaggacatatgttcaaatatgttcatagcagcattatttgtaatagccagaacctggaagcaacctagatggccctcaactgaagaatggatagagaaaatgtggtacatttacacaatggagtactactcagcagaaaaaaacaatggaatcttgaaattcacaggcaaatggatggaactagaagaaaccatcctgagtgaggtaacctagtcacaaaaagataaacatggtatgtactcactcatatatgaattttagacatagagcaaaggattaccagtctacaatccacactgccagagtagctggaaaacaaggagaaccccaagagaagactgcatagtccctcgaagaaggggagggggacaagaacccctgactaaagtgggagcctgaggaggggggagaggaaggaggtgggaaggaaagaagaggaggggggaggagaacaagaggactgagacagggaaggaacagaggagggcaagaaaggagatgtattgatagagggagacagtacaggattggagagaggtctggcacaggggaaatgttaggagatccacagggatgaccccaactaagaatccaggcagtggtggagaagataccattgatgtccttcccctatagtgagattgacgcctaccttggttaccattcctagagccttcatccagtatctcttcaaagcagaatcaggcacccacagctaagcattgaactatactactggaatccagttgtggagagggaggagggatgagcaaaggaaccaagatggtggtggagaaacctgcagaaacagttgacctgatctactgatatcatggagatcctagtcataaagctggggaaacagcattgtaccaaaccaagccctctgaatgtgggtgccagctaggaggccaagacagtctatgggtcctctaacagtggagccagtctttatccctagagcacaaatggactttgggagctcattccctatggagggatactattgcagcccagatatagcaaggagggcctaggccctccccaaaatgatatgacagactttgaaggttccctatggagggcctcactgtccctggggaggagttggggagtgggttgaggggttggtggggaacatgggaggatgggagggcaagggaatggggggaatggatatgtaaatatgagtagtaattaaagaataaattaaaataaataaataaaataaaaagaacttgtattttaaagtatttcaaagtatagaaatcacattttgcatgaaagtaagaaaactgaacctgaacaaagatgtgttgtatttggtatggaaattatgcctataagcagtggcctttccagaacaattgtattgcaagaactgcaggccaaccatcccttaccccaaagtcacctggcttcagacgcaacagcgtcacatcgaaactgagacagaaaaaaaaaaaaagcacagtgactctttttgtttgtttgtttgttttttgtttttttcttcccttttttattattaattcaagttagggaacaggcttgtttcacatgtaagtcccctctccctctccctcccctcacccccatccctcctcccctacctccaacctaccccccaccccatccacccaccacttcccaggcagggtagggcccccaacaggggctccacaaagtccaacaaatcttcctgtgctgggcctaggcccctccccatgtgtccagagacagagtgcatcccttcacgtgggatgggctctcaaagtcccccacacacaccaggggaaaacgccagtccacctccagaggctccctggagggcaggggcctccccattggcatccatgatctggggctggatcagtcccgcactggcctcccagacagcgtctggggtctatatgctttccctttttctggccaactgtttctgtgggtttctccaacctggtacagaccccttcgatcttcattcctccctctcttcaactaggttccagatttcagctcagtgtatttctgtggatgtctgtctctgcttccatcagccactggatgagtgctctaggatagcatagagggtagtcatcaatctcattctaggggaagggcttctaggccatcctctcctccactgcccagactgtcagatcgtgtcatccttgtaggtctctggagatctccctagttccagatctcttctcggacctatagtggctccctctgatatggtatctctcatcctgctctctctcctctattcttccccctactcaatatctctgctcctccatttcctctcctctactcttcttcttgtgctcttattgtggcagcaccctctcccctaccctcatgctctcaattagctcgggagttcatgccacttcccattcctggggtctatttatcccttagagtccttcatgatttctagtttctttggggaagaggattataggctggtaaacctttgctctatgtctaaaattcatatatgagtgagtacataccatgtttgtctttttgtgagtggattacctcactcaggatgttttcttctagttccatccattgcctgtgaatttcaagattccattgctttttttctgctgagtagtactccattgtataaatgtactgcattttctctttccattcttcagttgaggggcatctaggttgcttccaggttcaggctattacaaacaatgctgctatgaacatggttgaacagatgtccttgttgcatgaacatgcactatttgggtatatacccaagagaggaatggctggatcttgaggtagactgattcccatttttctgagcaaccgccatactgatttccagaatggtcttacaagttcacactcccaccagcaatggaggagtgttccttcttctctgcatcctctccagcataggttgtcattggtatttttgattttagccattctgacaggtgtgaggtggtatctcagagttgttttgagttgcatttctctgatggccaaggattttgagcactttcttaagtgtctttcagccatttcagattcctctgttgaaaaatctctgtttagttctgcaccccattttttaatttcattgtttggtgttttggtggctagcttcttgagctccttgtatattttggaaatcagccctctgtcagatgtggggttagtgaagatcttttcccattctgtgggtggtcattttgtcttactgactgtgtcctttgccttacagaagcttgtcagtttcaggaggtcccatttattgattgcagacctcagtgtctatgctcctggcgtgatgttcaggaatcggtctcctgtgccaatttgttccagggtaattcccactttctcttctagaagattcagtgtggctggatttatggagagatctttgatccatttgcccttaagttttgtgcatggtgacaggtatggatcaatctccaatcttctgcatgtccaaatccaattgtgccagcaccatttgttgaagatgctatcttttttccattgtatagatttagcacctttgtcaaaaataaggtgtccgtaggtgcgtgggttaatatctgggtcttcaattggattccatttgtctatctgtctatttttgtgccaataccaagctgttttcagaactatggctctatagtagagcttgaagtcaagggtggtgatgcctccagaagatcttttattgtaaagagttgttttggctgtcctgggttttttatttttccatataaagttgaatattgttctttcaatgtctgtgaaaaactgtgttgggattttgatggggattgcattgaatctgtagattgcttttggtaggattgccatttttactatgttaattctacctatccaagagcatgggagatctttccattttctggtatcttctttaatttctttctttaaagtctcaaagttcttattgtacaggtctttccctttttttggttagtgttacccccagatattttatgttgcttgtggatattgtgaaaggtgacgtttccatgatatctttctcattgagtttatcatctgtatacagtagggttacagattttttttgagttaattttgtatcctgctatcttgctgaacgtgtttatcagctgtaggagcttcctggtagagttttttgggtcacttatgtagactatcatgtcatctgcaaatagtgaaagtttgacttcttcctttccaatttgtatccctttgatcccctgttcttgtcttattgctctagctagaacttcaagtacaatattgaagaggtatggagagagtggacagccttgtcttgttcctgattttagaggaaacgcttctgagtttctctccatttatgatgttggctattggtttggtgtatacttcttttatcatgtttagatatgttcctgttattcctgttctctccaagatctttatcatgaagggatgttggattttgtcaaaggctttttcagcatctagtgagatgatcatgtggtttttctttttcagtttgtttatatggtggattacattgatggtttttcatatgttgaaccatccttgcatccctacttgatcatggtggatgatttttctgatatgttcttggattcgatgtgccaatattttattgagtattttagcatagatgttcatgagggatatcggtctgtagttctctttcttagtcttatctttgtgtggcttgggtatcaaagtgattgtagcctcatagaaagagtttggcaatatcccatctgcttctattgtgcggaacagtttgaggagtactggtatcagctcttgtttgaatttctggtagaattctgcagtgaagccatctggccctgggctttttttggttgggaggcttttgatgactgcttctatttcattaggggttatgggtcgatttaaactgtttatctgatcttggtttaattttggtaagtgatatttaaccagaaaactgtccatttccattagatttttgaattttgtggagtacaggttttcaaagtatgacctgaagattctctggatttccacagtgtccgttgttatatcccctttttgtttctgattttgttaattagcatgctctctctctgccttttggttagtttggctagaggtttgtctatcttgttgatcttctcaaagaaccaactctttgtttcattgattctttgtaatgttttcctagtttctactttattgatttcagctctcaggttgattatttcctggcgtctactcctccttggtgagtttgcttctttttgctctagtgttttcagttgttctgtcaattctctaatgtgacttttctccagtttcttcatgtgggcacttagtgctatgaacttccctcttagcactgctttcagagtgtcccataagtttgggtatgttgtgtctgcattctcattagattctaggaagtctttaatttttttttttttatttcttcctcaacccaggaatggtgcaattgggtgttactcattttccaagagtttgcaggttttctgccatttgtatcattactgaattctagctttaatgcatagtggtctgatcagatacagggggttatttcaattcttttgtaactatggaggtttgctttgttgcctactatgtggtcaattttagagaaggtgccatgtggtgctgagaagaaggtatattcttttgagtttggatggaatgctctatagatatctgttaacccctgttgggtcataacttctttcagatcctttgtttctttgttaagtttctgtctggtggtcctgtctagtggcataaggggggtgttgaatggttttatgtgtggtttgagctttagtaatgtttctttcacaagtgtggatgccttcgtatttggggcatagatgttcaggattgagatttcatcttgatagacttttcctgtgatgagtatgaaatgcccttcttcatctcttttgattgattttagtttaaagtccaatttgttagatattaggattgctacaccagcttgtttcttgagcccatttgattggaaaatcttttcccatccttttactctgaggtatcgcctgtctttgaagttgaggtgtgtttcttgtaaacagcagaaggatggattctgtcttcgtatccattctgttagcctatatctttttatgggaaagttaagaccattgacatttagggatattaatgtccattgttcgttggttttgtttgttttggatttattggtggtggtgtcattgtgtgtggatttcgccctcctgcttctttttgtgtttgcgaaaattagattatctattgcctgtgtttttgtgcatgtagttatgttcattgggttggagttttccttccagaaccttctgtagtgctggatttgtggatatgtattgtttaaatctgtttttgtcatggaatatcttgttttctccatctatagtgattgaaagttttgctgggtacagtagtctgggttgacatccatgctcccttagtgcttgtagggtatctatccaagaccttctggctttcagagtttccattgagaagtcgggtgtgattctaattggtttgcctttatatgttacttggcctttttcctttgctgctcttaatattttctctttattctgtagatttggagttttgattattatgtgtcggggggacttctttttgtggtccagtctgtttggcttcctattagcttcttctactttcataggcatatccttctgtaggttggggaagttttcttatatgattttgttgaatatgttttctgtacctttgagcagtgtttcttcatcttcttctatacctattattcttaggtttggtcttttcacggtgtcccatatttcctggatattttgtgttagggatttgttggacttgaggttttctttggttgatgaatgtatatcctctagcgagtcttcaatagctgagattctctcttctgtctcttggattctattagttatactcacatctttagttcctgatcatttatccagtctttccatttccagcatcacctcattctgtgttttctttattgtgtctaattcagctttcatgctttgaactgtttcaagagcttccttcacttgtttggttgttttatcttgggtttatttagattctttaagagatttgtttatttcttaaatttttgatttgtcttttcctccatttcgtgtaattttttgcttgctttttcttctatttctttaagggattttcttgtttcctctttgaaggtctctatcatcttgctgagataatttttgaggtccatctcttcttcatgcactgtgttgggcttttcagatcttgctggagtgaagtccctagattctggtggtgtcatattggtctttctgttgttgagcgagttcttattctgtcttcttcccatatctttttccagtgaatgcaggtggggtttctcatctcctcctgttacgcagtagtgtgtgtgggccaggaattcaatgtccgaagctctggatggtcttgcctctgctggtagtctgcttactctgaaggagttaggcctctccttgccgataggtcagcaggaagggaaggaagagtggcctgtacccagattcagggagctcctccctgcctgggaatgtctactccaagcatgcacaagcctggggagatctgggtgaatgaatggcgctttggacaggagttgggtaaaagcagggtgtcactcacctagttgctgatgggtcggcggaaagggcgcacagtgactcttgatcccatagacactcaagctaattgttatgttccttgcccatagctattgctggaagggtatgagggacatctctgtgtgaccatgacaagggaaactgtggttgccccaccctgtccctgattgccccccccgtctccccaccatggttggtgaagcccctgattctgctactgatctaggacatgtgtggggtctcctgtgagccttaagctcttggtctttgggggtgagcagcaacagaactgtgggtactctgcagaggacaggtgagctccaactcatggcagggaatgggagggcaagctgtgtaacttcggcccagctgctacacaatgggtggtcatgcttcccaccaagtctccatgagatcagttctgtctcctctgaccttgactagcaagaccacagcaacatttagctgccttgacaggaaactgaaaccagatgtcacctccaagttctgaattcctatccccagaacatcatcaaacagttagaaggagggtacctccttaacaggtattgactagagctgtatcagaccagagtactactataccagggctactgaagtcctttgcctaccttgctgattgagagccctaaaacagcatatttggtaacatctaaagaaagtacaactgaaaaccctaccctgattttgtgtcaggtgttggtgagtgaaaagggttagctatgagctatatccaatattcttggttcctcatagcccctctccatgggacctgattaaaagtaacaattcgtcctcaaaaatggccaaagatatggctgtacaaaattgaacaggcagaaaacaatttgctacaagtaaattaagtttgtgaatattgattgcaagttgatacaagatggtaagtgccattgacaaattcttgaaagcacagggtttatgctgagggttgggacactttggttctaagtttctggctttccaaagaccaatattaaccttcatttctgcttaaaagctcacaactatctgtaactccagttcaagggggcctgaaccccatggcaaaacactaatgcacgtaaaataaaatttgtagaaaaaataacttttcccactttaggaaattgatcacaggttttagtttattgattcactatgtatactaggcactattctagaagtcttgtgtgtcaatgagtcaacaaaccaggctttgacttcatggattttcctcttatgattggaagacagacaaaattcaaagaggcctatcataaaatgtcaggtcatgacaagtgttatgaggctgaacaatgaaaaggacagtgagggatggagagagaacagcagtgcataggtcctgaagttgggaagtgatacacagaaggagacaggagccagatcatgcgtgggtctgtagaccatggtgaagacttagattctgctagagtaccttctatgactacagatatttttgacactcaagctcacacatttcagtgatggatttcacgctgaacaactcagacattgggagctaactttaagaccttaagtactccctgacccagctttaggtacattggcaaaaatctctgatttaaaggcattgccttgcctaggctcctcgcccctagtcaggggcagccagtgtctggtcagtggaggttagaacatccccacccacttcttcccacacacctggaataaatcgaagggtgagagctccaggtaggaagggctgacgccaccactgcttttactgtgttgaagcccaacagtacctcaactgccacattcgtcacaccacacagtgttgatcatggggagacaggcatcataacaccaatgaaccctgacttcatctctcctgaagacagttttgaacatcaaagtacaccacacaagccctgcagcggcagatggggattgaaggataacactgaagccattgtaagcaattgacttaagatgagttcactgtctctggtagattcccaagttaagtcccttactttgtgctgttgagctggtctctctaaagtggatgctgataagagcgatgggatggtggcatgtactgatgggatggtggtgtgtactctgaggagtcagaacccctctttcctctctttgggctttttagtaggtctcacaggtcaattcattcaatcaagggtatggaacgtctataagcaacatgactacatatagacagatgtccaaaaggtgctgccagcaggaccacccacttttcctaccattaaagaatggctaagtgctcaaactagaatgttataaaactcttgtgtcacatgaacagacattgagtctgttcactcaagcagcttgggtcatattcacaatgtgtgaagcctttgatattagagagggcagagctgcagcaggccaaaagcataaaccatttatccactgaacaattcactgcccagtatagttggttcaaatccattaacaaaatgcacctataccttaccgatctctgtttattgtctgccatgtatcaattgttccccctctctccacatcactgagggtggtagggtgcctagctaaagcttgcattctcacatggggaggctggaatgcaaggagaagctgaagacttctgagaagtcttttcaccaggccttatttcagaaagcagagcgcacacttcactgcactgtctcctgtgtttctgggcccatgtgcatctctcttgagggccctattagcttcacttgggtggcatttgggacaccaatgataaacccacccaggagtttctggtctagttagttaaggttgccatccaagaatctgcgcatctgaggtcacaggatagtcctagtggccattttgtgaacaaaatctcatcttcagaatagagctcaaaccctaaagatggaaagcataaccagaaatgatctggcctcttcaagctatcctttgtgcccagacttcattttcttgaggaaaaataagcacccctgtcttgttaaaccagtgctctaggttttctaccacatataactgaacttaattgcatgtgataaaaaagaaagaaaaaaggccttaggctatatctagtatctcattccttcaacttttaaaaaaaatctcaagtttaatttttttcttcaagttaacagaaaattggaatatgactttagcaatgaaaacgttggattcttacattaaattggctgagtggcttcggccaatcaatgagttggtacttatcctaattatttctcaagaaattgtgcatccagatcccaaggtgcagaggtgtcatagcaagtgatttctcaagcactaaatgaattgtgtctagtatggaagttggaaggcatcccaaggcctgtgcccttgacagactgcatgagggttttcctttccagtggtagctgggaggatcaacagattttgccctaattcaatagcaagcccacccacctgattaggaaagtaatgcagtattcaaaaaggctatgctgaaagttgcttttggataattacacaatttctaaggggcctttgtcacaactcagacttttatgtgcctgctttttcaactaaaagattaagaaaaactgtgattattagtctcgagaaggcagatggctaaagttggatggtgccatggtccttaaattctgccatggatgaactaattcactgggtccagtcaccctctaagcagctgcctggtgacaaatttgcagggatacagcagaccctgccttgcctgtctccatcctcatggtaggtactcccagctaaatgactggatagttattctacatgtgtgtgaagggccaaaaattgtgagagatattggtctatcataggcacaggggaaaccttgatctgcagatgagaccaggccccaggttccatttaaaggcaaagtgtctgagaggacaaaaacaaaactcatggatcccagtcttaaagtcctaaccctaaaactggtcagcaaatatactataaaaaagcacttggctcatttcctagtttatagcctctttccccacttctaaactaagcccagagaaagtaaatcacaggccctccaacttcgtaagatgttgtaagctggctctggagctctgttgagactcctcaaaagaaaagattgccctctggcttccaagctctcccactggcctttctcctaactgaaataaagtctaactggaagcaaagtgagcagagggtcaagcaatatggtggacagtgtggatgcccaggctgaaccagagttaaccctgtctggaaaggaggtatgggtgtgctaaggaagggctcaagctaggatttggcgatggttttattttggttttgttccttgacatgagtattattagtgactgactattccgtatgcatgatgaactttgagccaagtaacaatgagacaaagtttccctccactcctaacttactccctaccccacacacacattcttctggccgataggacctcctatcttttcttgtcttcaaacatacaatgcaaaattgaatgtcaggaggatggcatgtctgtttggagtgaattcagaggggctggcgaaggcccaggagacggctaggctcagtcctgcaatggaaccttgaatgtactatccattagagtccctgggcacaggcaaaggggcaaacgcatacctatttatcctgctaaatgaggggaacatagcaatgcttcagtaccaggtcgcttctggatactcaagcattcgccttccagagaccctgggaaggtccactgacttccttttcaaatacagtgattctcttttgaatacctacccagatcgttccatattctgggctgttagttaactaagccctttccttgctccattccacctcctctcctagctgcccttttgctcttgagaacatccccagttccctcaaagtatctccttctttgatgacctcacttgctttttctcagtaaacatggaacccaatagaaagagaaccatagttcttaatttgaaagctgagggccgtaaaaagccttcctagggcagccaagaagtggagcagggtaaatttcttcctcttccctccgtttggcatgtgcagctattgtttggcttgcactgaagcctcagagtatgcctctctttaaaggagtccagcagccctgtacactctgagcacagcaaatattaagtaacaagaaagcaattaggtttcaggaaggaactccatgggtgtttgtttattcctgccaatcattactggagtctgaagtcccaggttgaggaattacaaccaacagttctttgtccattccaatttttgtgacacagtgggatttttttttctgtttgcttaaattacaggcaaaaactcccaagtgcacgattgagatggtcacccagtgtccacattaaaattcttagtaagaggtgctcagtgaggttctggaattattaaacctttttagtttgacactgcctgacctctggctacaaacccaccttgcctcataaaagctggagtctgagggctcaaggttaagaacccaggtcatgaccagccatctctgaaggatccatgatgctgcctagataataaccacagcctctttctggtcaattaatgtgttcccaatggtccatgagcacagataattctaaatattgatggcttaacagaataaatcagaggcacttcctgaaaacctgacgttagaaggaggcagcttctgaacacacaaagcatatcatttcattttatttccctcctgaaagagcttggaccaaacatctctaatgcaaatgactttgggctccctcacctgcagagctgattgtctttttcctgatggcccccttcccttgattaaaccctggagcttcagttaatacattaagtcagggctaggatccctgaaaacaaaccaaattaaaactgcaattcattatctagaagactcttcctgtcactctctgctgcaaaggagagccagggccaaagggaagaacaataggacagtcgacagaagaaagagctgaaggagagggagagacggcaagggtggtgagtacattcacaacagacaggcatcaaacatcatgttcttaattaaacaccgtctcatcccgagtttctttattacgcttctatagagattcatttgtattttttttctgccctcagtcatgcattgagactaatttgtgaacatcagaaatgatactgctcgagatgactcaaaagagatttctaaaaatgttgaccaatattgcagcttgggaaatagtagtaaacctgggctgtggtgtacacgtggacctccaatgatatagtctccggggccatcattcactgtcctcaccaaggctgctgggacacattaaatccaaaccctgcatgcttttaacccgcagagcaaagatggtctctggttgcacttgaggctttttctagatgtatagaaaaacttaggtggtagttagcaaatgagttaatttccttactttaaagatgcttaattactgaacaccaggcaattggaatgagtaggcggcttctccaggaaaagtaaaaactcaaaaagcatgtagtttccagccctacagacaatacaaacagaagataagggcaatttttctaatttgatgtctcccccactctgtgtgtgtgtgtgtgtgtgtgtgtgtgtgtgtgtgtgtgtgtgtgtgtgtgcgtgcacatatgtatgtctgcaggggcatggagacaagaagtcgttctcaggtgctatcctgactttttaaacgcctcatgggcctggatcttaccaaataagtgaggctaaccagccagtgagccccagaagtccacttgtctccaccttctgggcattaggattgcaagtgcacttcaccatcccatccctttgcacaagaaaacatgggagttgaactcaggtccttgggcttgcaaaacaagctcttttccaccctagctgtctccccagccactgattcagtcttgttggagacagaaggatgtcaacagctttgcactttaagcaggccacttagttctccagatcttcacaatgcttgggctatggctctattaatgggcagatagatgtaaactgaatttaaatctgataaggacactaactggtttcagccaatgccatttataccataccccctgccctactgctaggctctcagaaacctctcctgaaattctcctatgaggacaatttttttttaacatagtaagtatcaactgaaaaagtcacaagccattgggaaaagcaacatcattaaggagacatccattagtacatgttagcggatgcctgtctcttctgtgacactatcacagtgcggagttggctctttcagtgtggaatgcaagaggtgtgatcttcaggactaaaagtagaagagagcatttggctctagcacagagttgagggctctggaatgcaagcacagaggctgcatggacagagacagggagggaggtgggaaaagccgccaggaggaaggctatgcctcaagtccctaactggttggttcccatacaggcaagatgcatcacatctgacaacttagtcccgcccccaggtactccggacccaatggggtgggaggcaggttgggctattatctgtagctccaccttttagttccactttgctcccctctgctgtccacctgactttcacgggatacccccattctcacacttcatgtcactggccagaacatcccaggccctatcctccagctcactcctcctgcacactgtgtatttgtttgctttatgtaggtttttgttctgttggctggttttataggttggttttgtggcttggtttcattggttggttggtttggtacagaatgattttaaagctcagcctttagctccaatgtcaaagttactgtcaactatgtactttatagaatatcttctagtgcttggtctctggcctcctctctcccttccttccctgctttagctctgtatgaactagcaaagatcctctttgtctgccaggcggttctgaccttccaaggacttctccagcacgtacttttctcaaatactaatttttccatggcctttgtctggggatcttttataacccagtggctgccaggactgtggctttgcacatctacccagaccagctcagtaggatctgtggtccagagcctgccccactcgatgtatgaaaggaggaggggttgggggatgtggtaatatcttgcttgtacaaataaagcctgtttgaagatcagacaatggagattgccactagctaaccatagaggtctggagatctgtacaagagacaggaagtgagatagctgggcagcaacatgatgtaagcagagagaaacaggaacttgttcaattgtcttctgagatgctaaggaggtaaggtgtggctgtggcttgcttcttctctcttatctctcagcatttccctctatatctgactccaggtttttatttattagaccagtcaagaactccatctacaggagagagaggatatgtggtatttgttgtttgcttctgcctctaagcctgaataagagcagagagtcataaagaagtatggcaccctccttgtgagtcagagagtccgacatttcagttctagctctgcctacttgctggttgtatggccatgagagagttatttaatgtctctgtatttcagctacttctttaaagttaggaaaaaatctactccagattagtttaggagtcaaatgagattaattacaacgtgtgagttgacccccccatatgtggaataggtatagaagagtagtgtagattatccagctacctatactacctagcagattgctcagataagagaataagcacaagttcatctctggtatgacactgtcacaatacagaagcaattctttcagggtaggattacaggaggcctttataggtgggcaaggtgatgcacacctttaatcccagcactcaggaggtggagacaggtggatctcagtgcattcaaggcaagtctggtgtacagagaaagttccagaacagacagaacagacggagctatatagagaggccctgtctcaaaaacaaaaccaaataacaacagcaacaaaaacaagaggtatttatagcttgacccaaagtctgctcccaagcattagtacctatgcaaaaccttccagagaaaaccttctccagctcaaatagattgcatggtggtaggatttcaatgtatttacattgtcttccacatgggttgagctatcctgctgtggataaaatggacatcattaaatcttgctttttaggaggaataaaagatctttctcttttggataaaggcaaatgaaatgggctgtgttgactcttcccatggcgatcacttcctctctcttcaccacttgctaaactaatccctgattctaatcactggaatctcttatcaagggctgtgtagctggcaaccctccccatatactgcttcagtattaacatgtcatgaggaagaacacgggaggatcataagccacttctggagaagaacgaaacatagaaaatgactccacaaaatggcccaggtacttgggggagtgtggtagtccggggctgcctttctagctggtattttacaggaaaggatttattgcaccacaatgagcttgtatttatttctagcaagcatttttgcattattattcattcagcaattcagatgggaatttcgaggtgacagcttgccaatttttcatccccataaacattctggatgtgaatgtcttaatctgaaatcactgcattaattacaagggggtgggaaggtggggaaagttagcatggttttgacgatgctcacatctttgaagaactgtgctaaatggacaactctgacagtgcagatgggatgcttgactaggcctgctggagaggtgcgggggaggcacagactcatagaggcaactacacactgcccctgctagctctgaggcttttctacctttggggaaatgcttgcacctgtgcaagccaagatggcactttctttatttaatgttctccttgaagactacagagaagttattaatgcaacaaatagcctgtgtctaaacaaccagttattaggtagctagtctgtgcctagtgtattaacctgtgaccctgagttatagctctgagaggcacgttctgctattgtcaaactctggtgtgtttgcataagtttattatttgtctacccagctagaatttgattcctacaaagagagaaaccctgcactttctacacagctgaatacccatcaccaaaaacagaggcaagctgcagcaagatgaatggctgccagatgaacgaaggagggagggaaggccagatgctgaggtgacttaacgaatggtgagacccattccctgatgtcagttttaatctagttgtaaagcaaactatatgaaacagagccttcaaatcaaagcagggcacctgacactcttgggtcttccttggagtgtactgtgtatgggtgatggttgctggtgtctgtgcaggagtcaagagcctgttgttttcttgacaccccacctccaacactggtaaaaataagcttaccctcccttgcgcgtgctttcacaaccaactttgcataccctgcctcctctctttctgcccctcttgtttgggtctcattgctgaggtccaaggctttcctggctgtcattggtactatttggtttgtatccttccttcccatttccattaaatagcatccataagccgggctttggtggcgcacggccttaatcccagcactcggaaggcagaggcagaggcaggcagatctctatgagttcgagaccagcctggtctacaagagctagttccaggacagcctccaaagccacgaaaaaacgaaaaataaataaataaataaataaataaatagtatccatagatgggctagatacacgtgcttccctgaaagaaatattttcattcatatctcaaatagtgttgtaaaaccctgcgactattaatgggaatttaacagaatcatgttgtaattattacgatttggggaatatagaggaaaatcatgtccagaattttttctcaagcctcttgtgtattcatatgtatttaagcaccccagaaacaaacctagttcacaacaggggtttcttctaaattcatttgatcatagtgactttctatctaaaatgtgtactatttgtcactagaatgtagtgcagaaaatactggttctgtaagctttacagggagagggacatggagaggttgttagcttgagcaaggccttttgggagtttgaagactgaccattggatcactacaaattgatttggagtcagtatgattaagttcatgaagtcagactatagggaatcaaaagagggaagaccaaggaggtttcatggaagaggtggaatggggttgtgtttcaaataataaatatttagaaagaagaaaaaatatgaaatttcaagggtaggcaaaagtcaaagacagggagatgcaggactatgttgcctttaaactttaatttacttagctgcctgcaaatgtagttagattttgattcatgcatcccaacccccagcaccattctcttctgttgatctagtgtgtggaaatcactaagctaggattcaatacaagaggattttgttaagggaatgccttgtggtaggaaatgagatgaacccgaggaaagcctccagtctactgcacaggtctaagcccaagagatgggggaagggaggagagacagcctaagcttccaggaatcaggaggaagggtaagtaaggaagcaggaagtgctcacatcagcaatggccattggcagagctctttgtctcccaggtctggctctacctacatattcctactgcatgagcagcacatgcctgacatagcctggtcacaagcctgggcacaatgtaggtgggggcgggggttggtgctcagctgcaggaaggttacactgcctattgcagacatttagcaaaacccttccttaccaccatactcggggaagatggaggagaaggtgttgatggtgtagtaggaggaaaaagataaagtaagctagcccccacacaaggaacaaacactccatcaaacctaacccaaaggtctaacacctgaaatcaggagaaaaggtgcatatgatacaaaacacagcctcttgctcgttctgaccatctcctcatgcaaataccctcaccttccccaagggaaccttagtcactgtgggatctcaagcttatattattggcatggggcagactatcattacacacacacacacacacacacacacacacagagagagagagagagagagagagagagagagagagagagagagagagagtacaaatttaaaaaaaactactggggctccttctgtggggccttagaggagaccccagcaggtaagaggccagattcaacactgtttgcttcaggacaagctcattcctgcccatctgcaaaatatggccaagagacatggagtgcattgcatgagcacattcagaaataatttactgctgattgattcatggaaatgtatgatggccggcaagtgtttaattatctgaactgtgtgtgctttccatggtaaaggaacagctgatgagagatggagagagcaagccgctgaggataatgcacagagaatgaccccagagtagacccctgcatgctctcttccagcagggctgactaagccgctgacagacagccaggaggaaacccagtcacagtccttgcgggaggatcatatgtggcctcggttatccaactctctctgcttccttagcaatgaagatcaggggagcccgggaaatctgcattccaagaagaatgttctttaaaatgagtagcaagacagtacagaaggaggaaggtgtttggctcctgaggactgtggctaacattcctggttccctgtggttcctgagggctgtggttaacattcctggatccttgagaatgatccagagatggcaagaggtttccatactacccaacaaatgtgacagaaaaaaaaaataagggaggaataaaggagaaatgacagaagacaagaataggaaaactggggagaaagggggagtagagaacatgcaaggccacagttcttagctctagtggagccagagctataattgtttctgtcctcttcagcagcccttggatatagaacatggcatacaatatggttaaggtagctaggacaagttgtgatactaaattacattgtgctgagctctgacaatccagaagttctctgtctctgtctttttctgtctctctgtctctgtctctgacgctctctccctgtgtgtgtgtgtgtcggggggtaagcttggattgtcagtgtgagtcgattgagaatcacctaggaggctggagaagattagattatgaaatctctgagctaatgaatgatttagtcccttggtggattcctagcatgatgacatttattgagaggtggtaaaaagtagaaagtggagcctggctgaaagaagtaggtccctgggggtatgtccttggggtctatacattgacacctttctgctgtctctgtttccttcccacacctggtaatgtaaaagctccaacaagtgctgctacaaccatgatgctctctgtccaagtccacagggcctagcagccatggactgaaccctctgacactgggacccaataagttgtttcttttctgaagttctgtctggcactctagtcatagctctacaaaaaataatggatgcaatgtggttcttgcttggtttccaaggcatctagaaactcccttacaggtgtgtttctaatgtgctatgatggtcccaattcaacaaagaaagaaacccaactgtccagcattcaaatctaggcatagtcttccatattcatttcttatactctgcctcatcttgtgagggtgccatcttgctctctaacctcgcctatgttcccatttcagtgtacttagacacatcatttccaataaatagaactttggcttcataactaaatatattatccttgtctctatattactagactccaaaggcttattgttttatcaatagcagttatcctattgtgtggcaaatagtaacatcctgataaattattctcaggaaaatatgaaaaggatatatctgtacatacaataatatgccttcacttacaattatgtaaactttgcttaatgtttttcttctctacaaaacccaacttagcgtttatatttttttttcagaagcacactaaaatgccacctcaccacccccacccatactcacactctcaacaatgctatacttatttggaatctttcttttatgagtttggagtatagtatacactagcttgtagcaggctttgatccaaaggggtggtatacattaagcagattccatctgcttgagagcttgaaggcatcagggtgtagccaaagctattcagactttgaaggtccaagatgtggtcccagcttctatacttcccatccctccttaggcatgtactaattttcagtaacatttcagaagctgagaagtcgggcaaagggtggtgaggtgggaagaggagctggctgagcattggcagtctcctttaaccaggaaaggaaaactaggcttggcaagcgcctgtgtgtccgccagtgtatccaggatgcctgtttagagtgctgaaaccagaggcatggccaagtgcaagcctgacacttagaggttctttctcccttccgatatttagctgaaaggcttcaaagccgaactgatagcacatggaaatcacagtagagggtttagcagccatttagtcctggggagataaaagcaataggttatattaaacacagtgagatcccatgggagccctgaacatttaaatcagaagtaaacttttttttttttgtctctagttggcgtggggtgaggtgtttctcctctaagtgtctgggagagatagggtgaattctgccagtaggtgatatgaggagcctctcctgcatttctgtgcatctctgacaaataccaaatttaattgagaatacgagtaaaggcgatgcttttggtcagtctgacaagaccagccagagcaactttgtaagggaagacacattttacctcacagtttcagatcattagtccacatccactgctgtgtttctgtggcaaggcagaatatcacagtggtgagaacatgtgatggagctcacctcacagcagccatgtaaacctggagtcagataggggtaatgccaaaagatcagagaatcagagcagccagccactagttcttacctcaactgaatcctcagaccaagggatcgatactgaattggagacaggagtaatatgactgggcagagagaggaatataagaagggaggagacaggaactcagagcattcattctgaggattaggcagtggtaaaaagtctctctagcggctggctcctttactcctctgacctttcagcatttaccctgaaatctgactctgggtttttattattaagattaattagaattcagtatacacaggcaggaggcagagagggggagatgcctttgctaacaagcttcttgttttcctcttcattccacctggaccccagctaattgaggggtgctagccattaccttcaaggttagtctctctcatgtcatcctgtctagaaatgccctctcagacatgcccagatatatgcttcattaattttcctggcgattttcaagcagtcttgttgatagtcaaatttaactatcacaaagggaaaaacagagaccataagaatcctacaggaaaaccacatgctggaatctccaaatattcattgtcttaccgtgttttagaaaatagataaagggactggacctggctgttcttccagaagagtgggttccattcctagcccccacatggtaactcataactatttttaactcctgtccgttcggatctgatgccctcttctggcctgcacaggtagcagacacttacatggtgcacaggcatagagatacaggcaaaacacctatacacatacaataagcatactatataaaagttgggggtttttttgggggggattgctgttgttgttgttttggtttgggtttttagagacagggtttctctgtgtaaccctgtagccctggctgtcctggaactcactttgtaatccaagctggcctctaactcagagatctatctgcctctgtctcccaagtgctgggttgaaaggcatgtgccaccactgctcagctatcaataagtacatataatatgtagcagagcaaatgttagttgactgaaaattaaatcattcttgaacatgggaaagaaaataagacaaaataaacacggaagaacagtccaatatactcttgagtggcacaccagaaagaggcaagagaatgggaaagaagcaattctggaagagaaaatacctgaccattcccccaagcttgtgagagctatcaaggttcagattgcacaagtgctctaaggacaagtgcactaaatgcaagggaaactccacttaaatatgcgtagtaatgaaactgccaaacgctaacaacaaagtcaaattagacaaacaaacaaaagtaccttcgaatgaacaaggattcaaaattacctcttaatgaactatggaaagttaaatgactaaactgtcatgacatcttaaaaggccggagagcacctgctgtcctcgagtccttggggaagttaacctgtaggaatgagaacaagtggagaggtttccactccaacaaaaccagaatttcatccctcgaaaggttatacttataaaaagaggcaaggagtcctcagaaagattttttataaaaatgagcaccaaagaattgcatgaatgcatcctgaaaaaaaaaaaactaatattagagatatagatgattttaaatagtattaaaactgcaataatgatagtaggtttttttttaagtatacagaatcaaaatgtgtgagaaaagcaaccaaaatgggcattgttcagtttactgaaaaaaaaaaaaaaaaaaaaaggattcattgtgccctgcccacctgtgttgcaccagtgcgcagctcagagatggcgtatggaacaatgctattgagagttgaatgctagcaacactcttggtgttgacttaaaagactagctctgcccttgcccactaggggactagtgacagtttgactactttccatttaacatactaagcacagaaccttacaaagcatttcaagagccaaagccctgagaaatgttttgcctgctaaccacctggggctcatctcttcctgaagcccctggaagatcccctgcccccccccccacttccctaacagccttttcgaagtggcaaaacattgcagggcacagaatggcctctgcggcctatgcttaggacagggttatttatattggctcaaagccctcttcctccaactgttgaggctttgttctggaagaaagcaaggtagatggagggaacagtgtagcagtatgtgtctgtggagctgtcaaacttcattttccaagtgcttcttccaaaggtcttaacatgacaaactgcctctgcctcaaggatgattttgtttttcaaagaaaagcccagggggctagaggcagttcctaaaggggagggaggaggctacaggcagttcctaaaggggaggagggctcagaggaggacaccagatgatgacttcagtctcctcccagccccctcccctctcctcacaaaacccagagagctgacatgaaatacatatactccatgggactgacagatgtagagtgagtttgtgataggggataatttagcatccctcttagttttccagacccatcacaatcaagctttaaaaacaaacaaacaaaaaaacctcaagggcaaaatgatcagacaggtttcaaagctctcccacaaagtcaaacagttgaatgtgactatgactgaaaggtgggatgcagaggaacaagagccccgtgtcagtcctgggtcacagagcacatccttcctggaatgccacctttcctatcgaggagtgggaacagtagcaaggcccagccagcatactttatgtgctccaagggggagatctaataaagcgtatacaggagcttttttaatacaaggttcttgaagacaatttgttttcatcaggctgtgatagatgaataatgcatgaaaaagaacacagagatctagagggctatacacagggccattttcagcccaaccccttcatttttcagatgacaaaactgagtgaaatgcaaagaaagtgattttcccaatgcaatgaaattggaaaaggagggagaaagcatccctcagatctgttccacgtgctccttggagatcctctgcaccctgtgataagaatgaccagagtccagtaaagaccattccttttgctttgatgtccacagacagtcctgagctgggggaaaggattcagaggagatgaaagagagatgctaatggtcataggcatcccatgttttcttcctggcatcatatcaagaatttgaaagcatgggaacaccttatctgaaggatatgatgttcataaaattatccagtgccagcccagacacccttctcagagtgaggtgtcctgtgtacctctttgatgctgcctgatgctgccgtggtccatgtacaactgctcagaagtcgagaggaaaatctgggtctccatgggctccagcatcatttctggagcacctggaaagaagcggatggctgaggatgcttgatgtgtgaactcatatctttggtcctgatgacaggtgtttgcatacaagtcacacaggttgtcttcaaggatagctttcttgttggggttgcgccccacccctgccacccacaccgagtcacagataagttcctaataactgggttggagcttctgtgacagttcaagggtccacacataaaagacagtcctgctatgcatttggcataaagcacttggaacttggaacttgagctcttgatcagtaactattaaaataccagtttccccttatgccttcaaagctgtgagtcctcaggagtctttgaagatgaagtgggcatttgatcctgaacccactcccaccaccccagcaggacgcacagcttgccagcatgtctgctttttaccccttcaaaggtgacaaatcaaagagccccaggtctcagtggctcccagtaggctactgggttaacccagccacattttggcactaggtcaatgcctttatttggacctgggtgttcccccagatcacattaatctttaatcggtgttttctctgatgtcacaagccctagagcctgcgccagatcttgagactcactgatttcatgtcatcagggcctgaatagagcaccttcagtgcaaaaaaacaaaaaacaaaacaaaacaaaaaaaacactgccactgactcaaacaagaaagagcctgtccccaaggtgccaagtcaccaagcaaaagaaacctcctccaaatacagcatggtccctttgttctgtgccagtcagtccctctttaaatgtactgtcatccctgattcatccctttctttcaggcagggtgactcagagggaaagtgctatgtaaagtcttgctccacttaattgataaaatacagccaagccaaagaagggtttcgaagagtccaaggatgcgctgagggagattgctaagcaacacgcccaggggccatgggtacagacagctgagaagggacatcagagaaccagctgggctggccttcagccatttggaacgtaaacctcagaagaggacaaaaaggccctgccagaagtccacaaatgccacccaggaacacaagccagaggcaggccacacacatttacagtgtgagaagacccatgtgacccatttttgtcatctcttaagcatccctgattatatatgtcacttcaaagggttgtggcagggtcagatgccatgcacggaaaagtgatgcttccttcactcggcaagctggatggaccttcagccagagcaaacagtacagaacttgacactccctttgagtaataaaggacatggaaacatgtacaaaatatgtagatatagatgtctacatgtacagaaatgcacatgtgtgtacaaacatagatttcccccatgcatactgactgaacacatgtagatactttgctgttgggctaataaccaatgttatacttttaaaatgttttttaaagcttaaacattggaagcagatgcaatttgcttcagcaacagaaagtttgcacatagggcagagatttgagccagatttgatgatccaggcctataatttcaggactgacttaagatgtgggagcaggaggattgccatgggtctcaagctggcctaggctaaagtgtgaagctatgtatttaaagaaagagggaaaggctaagttagtgaataagatctttgactctggctccctggagtttgagcaccccttatccgaactcaagagagtagcttgtagtgttcacaatcaaggggcctggacactgggaaacacttatgaggtgatagagtcacgccaggtgactgagggaccatcccattcagtctacttgctgactcggttcttgggtgtctcttaagagacttttagtacctgggtagtttacatttcatattataagcaagtgtttaccaggattatcatgtcttagaggcatgggagattggaggtggggggaaaggttgaccattggactgcaaacccaatgtcacacaacaaaatggagtgcagcggagactgggggggaagtgtttatgaactgatggcttccccaggtggtggttgtgttaaaaaaaaaaaagaaagaaaaagaataacaacaaaaattagtcttccctgtccatgccccagtccatggtatgacagtgtaagttttggtgttgacatcataacccccaactctcagtggctttgcaagaaaggcttgattcagtcaggtccatagttcatgtgaccccaccagatacccctactctatctgtggagatctctgagagttacccaaaaggggaagaaagaggaggaggaaggctactggctcagaacctttgaaatagatattacacacctcactttgcctagagctctttgctcagtgctaatagcctgcaccttcactacattaaacatgggagatggagaatttctgtgagcactaaccagcttatatataagatgtagtcacagccaggcagtggtggcacacacctttaatcccagccctggggaggcagaagcaggtggatttttgtgaggtcgaggccagcctggtctacagagcaagttataggacagccagggctacacagagaaaacctgtctcaaaaaaaaaaaaaaaaaaaaaaaaaacccaaaaaaacaaacaaacaaaaaaacaaaaaccaagcaaacaacaacaaaaggtgtagtcacgatctattactagcttttagcattatccaagacttgctgcaaagtgccatgttagcagtgcctccaaggtccctgagacaaatgtacccatgttctcttctctccttggctcaggtctatgtttgatgcaatcagtgctctgtgagttgaggctatcacctgcaatgggatgccgaaggagcagtctttaaagtaactggtaaagttactaccacccagcacttgggctctaggtcctgatacagatatgttgataatatatatatatatatatatatatatatatatatatatcatgttactaatatggtaatatggcaatagcacctatgcaagctattactcttgagaccctagtaaatacccttaacccacacaagagtgaggctatatgtgggcaggaacagaaaggcttgtcccttgatgtcttctctgattgtccttgtcctttcaactttcatatcccaaatatctctaatccaaaatgtctccatttcctttacccaaaggccaggggtgtccatatgaatgaatggatataaataatttggtggtaggagaacacccatgtctatataccagaagaccttcaatctggccaaagtgagcactgtgaatatgtgggtaccgcacaaaagaagccacctggtttgaattgctgataaatggcatggtgagcaagtgccaaatactgtgcctgctgtttgtttttctgtgtatctatcttgtcgaccttggagtccacagagcccaagcttcatttttttctgcagatcatttattttttaagcattgtatggtaattgagtaaaagaacaattgtcaaaataaaaaccagagtcaagatctgcccccacgagtcaccagtggaaggagtttgacacattgctatgacttgtctttgctataagagtatcagtccgctggggggtagctcagtggcagagcacttgcccagcattatgtgtggagcctgatgttcaatcccagcatcaaaataaagagaaaaatgttggaaaagaaggaaatcaaagtttaaactccagaaactatttaaacttcagctgaaccagctcgtcccagtttgtagctagggaaagcaagactcagacaggtcaatcaattctcagggttcagagcaggcagaaccagggcagtaacttctgactctggctctacttgctgatgtgctatacgatttctctcttttctgtctccctcactaacaatcccaggagaaaggaaggatggagagcgtaaatactgacaactgataacgtgaatgatacagcttatgctgctcaagcaagaagaaggtactttctggggatcctcatgcatccccagataggcacttcccaggttgtcagaaagtgaggaccatcttgctgatgagtgaacattttccagtctggtgcgttctcatcagaagcagccaatggcattgcctgttctttgtcattcctcataaccaagctttcaaagccttaaagagaaaccatgcttggtgatggtgggcacctttgattaacagatgtggtaaggaacaagatgttaagaggtcaaaaggaaattaatctagcaggatgctgctggggcaatctttctgttgtctggctccctaaatcttacccaagagcaatgtgtcatccccaagaaacaccaaagcactgggtgcctactattaaacaatgtgctttgattttgggttttttttttttttttttactccaaagtgaatagggtgtgtggtgaatagggttaaaagcagtctgtagtcataattatgactagaaggtactcatttaacctctctgactttcattttagcttttttttcctttttcaatttacaaaatggcagaattgaattagatgacctctaagacccctttcttgctcagaaatttcaaaaccgtaaacactaaagcaccctacctcgcattaagattaaactcatagttctgcctcgttagcaaccatccctaatcagacagggggagaaaggactatcttcatcatctgatgtgtatgaacctggaatacctagaatcttagaagccccttcctccaaaagcctggttctggaaacataaaccgtcttactcctaacttgctgggtgacaagctatcagtatgctggctggagtcaaatggaagaataagctagtgtgtttatgatttgttacgtattgagcacagctccattaccaaggtatctagaagatatgtaaagcaagattgtgttggcattctcttgagaaaatgaaaaataaattattttattgtgtcttttataaaaggcttttataaatattataaccatttatggtaggtagtgaagttggctaataaatctggctatttttttggagtggtttaggtttatctgctccacttttatttttaattgatagttatatgtatttatgggaacaatacaatatttctgtgtgcatgttgtataatgatccaatcggggtagtctgcctgtccccttaaacatcttgttcttgtggtaagatcattgaaaatcctttcttctagctgttgtagcttgtcacttcgttaatcttagcaacaatcctactactgcacagcagaaccacagaaaccactcccctatgtgactttggcactgttttcctatctttcccaccttcccagccttatatgcccatgtagaaatgagatgatactacctttgtgttcctgtgcctggcttatttcacttaacagaagtcttctggactcatctgtgttgtcataactccacactcctctatatcaataataccccacttaaagtccctcttttgcaaacatctaagtgctttccatttttctgatagactcagatggatacaagaaccttaataagccaagacaataggtgacaagaaatgacctcttctgcccagcagtgattgtacatgccttgtctcccagcactggagagacagaggcaagtagttctctgagtttgaggccagcttggtctacagagcaagtcacaggatagccagggttacacagagaaaccctgtctcaagaaacaaaacaaaaaggaaggcaggaaggcaggcaggcaggcaggcaggcaggcaggcaggcaggaaggaaggaaggaaggtcctcttataatagggaaagcctagtctgaagggtagcaatctcccctcaacctgaaaaagggttcctgtctttaatgagagaaaatgcagtgactttccaatggatcccagagcaggatatctggattagaaagctggcctgagtgatcccatgtatgttcttaatctctgtgtcttgtgtcctggtgcagcaaacgaagttagtaacacccctttatggaattgagagcattaaatgacttaggatggtacatgtataatgctttagcaagtagccagtggattcagagtgatacagaattgctagctagctattgttatttgtctaaggactccaggctgaagcacagaaggttgatgcctccctgggtctcagacatcaataatcatccccatattcgaatgatggatttctcctgacatttcttctttaaggatcacagctttagaagttagaggaagcatggcctgattgacagggatgctgcaaagagaaataatattccaggggccagtgatggttaccatggtttccaactggcagaaactccaaggtcaatttctgaaaatatttcactgctgataggatcagggtgattcctccacctttctcatctctggccctcacgggggtcgattgttataatgctaacccctgtttgcagacagcagataaaaatgaaaataagaaagaaccagagaacacaaccgtctggctgaccactgaccagggaggcaaataagactgatttcccaaggggacagaagagcgatgcaccacttaagaaatgaaaatgcgatcatctggaagggaacaaaacgttttaatgtgagacctgggtctgcattgataaagagcaccgtggacacgtttacgcgacttgaaattttagcttcgctctgagggattcatttttacttccctgaaaagcaagtcccattgggagtaatcagagtacccggagcttcgggagaaccacagccacagcctgccaacagtacagccagccttcgaacccccaccagtctcaactgtccagccttcagaattaaagtcctccgacatcctgaatgcagtgtcgataaaacagtctcccctgttgaatgactcaagcagtttcccgaaagccttttctacaggaaagggcattaccctcaaaagcctcctcagggatatggccttgcgttcagcaagcctgtgccaccccattagccaggctcaaagccagtgttttcatcccagacaggctgggcagtcattttgtagaaccagaattttacgagtgtctctactgtagaagactgcctagctacctatgtgtcctctcccaaatcacatgccagaattctaacccacaacagtagtaggctaaaagcatctaggtcaactgtgaagtatttgggattagagacttcaagtctgtgggacctcatggtagcattagtggctttataagtagaggaagagaaacctgggtggctcccaaatacgatgtcctccaccaatgccaagcaaatgcctcctctctgctctgacacttctccttcaggaccacgactcaaataaacttgtctttataccaacttgtgtttcaccaacaggaagagaactaagatgccagtaaaatacccaccccccaaatgtaaacaaaagaaaaaaatgcctacaagttaataacaattcaccactacaaagtagtcaaatacatccatttggaaaggatgtcttcagcaggtgctcaactttaatgcagtgactacgcccaaagtgtgggatctgcttcctgagactgaggaaggaatggcacctgggacaggtgcctgaataatgaattgactgggtgttacaaaaagatggacctggcatagcggtgcaggcaggcctttgatcccaggaggcagaggcaggcagatctctgtgaatttgaggctggagtgatctacagagtgagttccaggacagccagggctgcataaagaaaccctgtctcagaaaaaaaaaaaaaaaaaatgggtggagagttccagttcaagcagttttgcaaatgccctatggcagaaggaagcaattatgtggtcgctgtgtaagaagtttataagaaagctggggtggcctgagtaagtcttacaaagtaaggcacaaaaagttggtatggctagacagtgtgaagccttgtgagtacacatgacttttgtctctaactcaagatatggagtagatgcagggaagagaataatttattatcctgttcatttacgtactttcctgtcatttgaaaataagtatgccttgatttgggaggggggccaataattcttttctctgttattttgatcataggacacaaatttaaaatagaattttaaagtatgactgtgtagatgtcatagtcattatgacttcacttttactaacattttttttcctcttgaaaggcctccttggtccaaatgaaggtgttcttgggggcatgtttttgtttggggttttttgttttagtttggactttggttctggggatcaaatcaggggtttttgcacatgctaaatgagttttctaacatttgaaaatagccttttcctatggaagcctagagaacccaaacacatgtacttttctacttagttttttcacatttgatgtaggcacaaccctgtctgcatgtgtgtggaggccagaggctatcaaactgctgtctcgctctattgctcttcaatgtatgaagtggacagagtttctctgtgaaccttaattcagctagcctagccagctacctttgccccagggactccaaaacttggcttcccaagcactgggattatagtcagtgccacccattttttttcagtggctgttggagaccagagctccattcctcatgtttacacggcaagcacttatctcccgagccctcaccctagctcttggttttctacttctgcagcaaatgctatgttctctagtgaagctaaagcttacacacttacaaagccacactagaaactagaatgaaagtagttattatggttggctttgaggcacttctttaatgacttcacactctttgctgctgaccctctggagagacaacatctgtttctcttgctcaggaaccaggggtgggcttgaggattcctttggtgatgcggttattttgaaatgcatttatgggccttctttacattggcttggagagacctagagttcctgctgtcactctcctggaatatctgccccacgtgaatggggacctggtctgctgggaagccagtgtgggagacagccgtacaccccagaagacacctgacaacagctagtaataggcagtttgtgaggccaccttaagtcacccaggtcctgtcaaactacaataggatgcagacatgaggatgacccaggctaatgcaagaactatagacttgagccttggagaaccatgaacaaatttggcaggctattttgaagcgctaacttttggaaaagtttgttatacaccaataggtaactttgctatcgccagattcactcatagtttagtgtctgatttatctgtgaaatcaagaaaatgacattttcataaaatgtacgcctatatgcagtactaaatggactcacctagcagtattcatatattgatacaatgtatgcatgtaacaataagtttaaaaaagagaaaagagggatggggaggtgggatagacctgagaagagctaggggaggaatagggcaggggtgaatataaaaatacattgtgcagagctgtggtggcgcactcctttagttccagcactcgggaggcagaggcaggcagatctctgtgagttcgagaccagcctggtctacaagagctagttccaggacagcctccaaagccacagagaaaccctgtctcgaaaaaaaaaaaaaatacattgtgcagagctgtggtggcgcactcctttagttccagcactcgggaggcagaggcaggcagatctctgtgagttcgagaccagcctggtctacaagagctagttccaggacagcctccaaagccacagagaaaccctgtcttaaaaaaccaaaagataaataaataaataaaatacattttatgaaattctggaagaactagtaaaaatattacattagagaagaatcatgtttaatttttttaaatgtcagtctgtgaagtatttgcttaccaaattttattgtgctcatctgaaatatctacttttatttttggcctatcaggcttttctatgaaaatatctgcaaaggcaagtttggtagtgtggactggctataatcccagcacactggaggctggggcatgcaggggcactgtgagttctagaccagcttaggccacagagaaagatgtcatttcaaatgaagaaagctgagaaatggtgaattccttatgtccctaaaagggtagattcacccattcttggctcaatctaatgatctgagcagaggtacatatctaaattgtttcctcctgcattacaaagcatttatctattccaaatagaggtgctatgaatagcctctaagactggtatctcagacctgaaaaagaggggctttgtgtaccctggaatcttaggtcaaccacatactatcagtgtggtctaagatcagggcgttggatgtgaactaggcagggacattaggacatgaactcggggtgttcaaagggctgaaaactgagcagtcagctctgtgatgcaacaggcaggcgagggctagcctgctttctttgtggtctgggctctgtgcttgttatcatgcatagcacccagggagtattcccccctcattccatgaggaaggatgctattagggccactttccttaactctgattaatacatgctcttactacagccacatgaccacagagtgagacttggtgtcaaaacactggaaaacaaaccatgaccgcatgtcagtaagaaacaggctgttgtcactgagcctttctgctcaggtatctgaacctagggtggtggggaagcttggaacttgatagcttgataactgatgtcagagtgagatattttacatggcttgttgcccttcttttgcaattaatttttataccttccttctgtgtggcaatttaaatggcttcccagaaatctgccctgactagtgtacttcttgagaaaacagggccaaagtgggaagaggatgagacttccttctatcctaaatggtagataacatttttaagctatttttttttttagagacttctaagtcagctttaacacactgcatccctatggttccgcaaaagatcaataaactgacatgtgaacagccccagagcccaaggtacatagctcaaagaggaccaaagtcaaggttcaacctctttatggtctgaacacttctagttcttgaggagacacacaggacttctctctacatcgttatcctgaggggaggactcctcccagccaggctctgtgagagtggcccccattagattcacactggaagcctgaggagatgtggcacagctgtaaagagaagtgagtaattcaaacagaagcatcccacaaatgtgagtaactgaaatgtgaattgtgacgccataggggagctctgttttaaatgttctcatagcagtttcaataaacaaacccagatttcccgtccacccaccccacccaccccatctttcccaactccacctcatccaactccacccaccccatcccatcctacccaacctacctcaccctacctaccacaccccatcccagctcacccaccccacccaccgtggcctggaagaaatctcggtacaaagagaactgagtccctgtgagaggctgacttttaaagatggcagttgtgaagctgccccatgtctgctttctgatgctgcctggtccctgcctttgctctgttcttttgtgaggaaggaatatgagctttgtgcttgagcacagcagtcactctgcgatccagagcgagatccagaatacgctgtctcttggcactcacacatacatgcagtgtaataaccaaatgtcacaaaaggcctctgaatcctcaaaagaggtggctgtaatgctaggtgccaggaagaatgagtgtgctgtttgcccaaacgatacttgtcaaatggaagtcaaaattagaagtaattttagggagacatgttaggaagctgaaatccatttatttcagcattaagtaaacaccttttatatcccaaacattcagctgaatgctctgcagaaatgtaacaagtagagcagatagtccctccttaacatttagcgtttaattaaatcacatacttgactaagtggatgaaagaaagataattcgtggatcttgcttttccagtagcttgtgttttgggggcggaaacgaaaggtatgcgcttgagatatttaagacataacggaaggcaggaggcacaagtgccagagtggttggcacagagtcgagacaatgtccaggctggtctgcggtgtatccactgagcaggaaggacttacctgaagaatctgttcacagatcagtttctgaggaaacatgtctcttgtgaacccacaaagaaactcaagcagtttcagcaatgatgtaagatcagttaagtgattctggaaacatgtgatgtacctgtggtagtttgaatgtaattgaccccgtaatctcataggagtggtgctgtgaggagctgtgggtttgctggagtgggtatacccttgttggaggaagtgtgtcgctgtgggggtggtgggctttgaggtctcctttgctcaggataccacccagtgtctccatcaacttcctgttgccagaaagatgtaggactctccgctccagcaccacttgggcctgccctccactgttctccacatcataatagattggagctctgaaactgtaagtgagccacccagttaaatggtttctttataagagttgctgtggtcatggtgtctcttcacaacgatgaaaaccctaactaagaaagtatccataagcatattaaaacttagaaggcagggatggtggtacatggctgtaatcccaacactagggaagtagaggcaggaggagctgaagttcaaggtcttcctcagcaatgtagttagttcaaggccagtttgtgacacataagatgcataagaccctgtctggagaaaaaaaaatatctttgaacagggttaccatatgacccaaagattctgttcatagatcttcaaccctcctaatgcattcctatgtctggatgaaaacttgtccataaacacccagagaggtgttactcacaggtgttacccaaaatagaatcaagccaagtttctttgagctgatgaatggataaacaagtttatccatttatgtatttgtatgatggagctgtagttggcaataataaaaaaagaaaggcactgactgcactatggcccaatggtggagcaaagggctggcgtgtgcaaaactgtagatttgatcttcatagcaaaaaaaaaaaaaaaatgaggtagccacaacttataattgggctgaaccttgaaaacattatgcccagtgggaaaagacatatcatgtgagtttgattacataaacacagaactagccagtcttctaacagaaagcagatcagtgttctcctgggactgaggggggagggaataggatgtggcttctgagattcagacagaatatggtgggagcagtgggaaaatgttctgaagttacctaatcaggatggctgcccaacctggggcaggcgaattgtatagcatataattgtatctgaacaaaactgttgttattagcactagcaaaaaggacaagtcaaaaaaggaatgctcccaaattaaaaaaaacaaaacaaaacaaaacaacaacaacaacaaaaaaaaacaaaaaacagaaaacactagatcctgtcagtgaaattataaaatagatacctccggaaagatgactagtcataaaaaaaatatagaaagatgatcctctctagagcttcttgatcgaattctgtctctctggtttttttgtttgtttgtttttttcgagacagggcttctctgtgtagctttggagcctatcctggcacttgctctagagaccaggctggctcgaactcacagagattcacctgcctctgcctcccgaatgctaggattaaaagcgtgcaccaccaccgcccggcttgttttttcttttttatgttgtgtgtttgcttgtttgtatacactatgtaaacatgtgtgaatacaggtgtatgcatgccacagtgcacatgtgggagccagaggacaacctcaggcatcatcagtccttacattccaccttgtttggacagggtctctcagtgttcgccgtggcatgcactaatctagcttgctcatgagttttcagggactctcctgtcttcttcctatctctcagcagtggggaactctgggattacagacacaggttcacacttcccgcctgactggggatctaaactcaggtcttcatgcttaccaggcaagcattttacccatgagctatctcctagcctgaactttgccttgcttacaggtgatttggaagatagccaaaatgcctgaattaatttctcatcatttcacattggtaactggtatgattgcagtttttcccctgtgactaaaaggcaattcatggttacaaaaataaagacttgtcaaaacttccctctcaatagcaattgctttaggtacttgaagtctggcatggtggcaggcacctttaattccagcacttggtaggtagcagcaggtggatctcttcgagtatgagaccagcctgttctatgtagtgaattccaagtcagacctggtttaaaaaaaaaaaaaaaaaaggcaaataaatactgagtactcctattggtcagcccaggctagtataacaaaatactacaggctaggtaatcttatttgcaaatgttaacttcttgacaatctagagattcaacatccaagacaaagatgttggcaaggtcaatttctcccaaggtgtacagatggcctccttctggctgcatccttatatggccttttctctgtgtttattttctatatcttttcctgttttaaggacttgggtttatcagataattcttcaaccttatgaacctatttcaatttaatttcttccttaaggactctatttccctatacagtcacatcagagagtgtggtggaggggaagaaaagattctgcccttgcacacacatttatttgctattagtgcatgaaatgaattcccattttcctttccaagggctcaaattttgttactatttttaattgtttgggaatttatgccatctcagttccagccagctccctccaacccaggaaaaccttctgtcctcaggaaaaaaaaaaaaaaaacccttcgtgttttttgagcacttccttgcactcattaacaataagacactccagattctaattaaatgttatatatcacatttggatctccacaaattcaatcaactctgagtctaagatattcagaaaaagttgaatgtgtactgaatatcatagacttttttcttgtcactcacaaagcaatacagtgtaatagctacttacattggcaataatgtttacactttgttagatccgctgttcttaacctgtgggttgcaaccactttggagatcacatataagatatcctgcatgtcagctatcctgtatatcagatatttacaatatgattataacattagcaaaattacagttatatgaagtagcaatgaaataattttatgattggggtcatcacaacatgaggaactatattaaagggtctcagcattaggaagggtgagaacccctgttctgaagtacatgaatgttttaaagtacatgggagggtatgcataggttaaatgcagataccatactactttttagtgtttgtttacttggggattgggaggtaagcatgtatgtggcacagtatacatatgtgggagttagttctctttttagtgtgtgacttccaaggattagatttagtttatcaggttgggcagcaagcatctttaccttgttgacctccataccatatatagatcttgaaatccagtgagccctgagaccaatccatttaggatacatagagatgactctctctctgtgtgtgtgtctgtgtgtgtcagagatagagggaagtgagggagggagcacacatacaactatccattattgtgacaaatatctgaacaacttactgttgccaggaaacctagggtttgctttttggtcctttgtcttattaataaaagagtttaaaatggactcataataaagcttgagaacaatttttttagagtttaagagaaaaacaatagtacaggcaggctgacaatctcaccaactgtcaggagaagggagatagagaagaaagaggaagaaagaaagcagctatgccatttgttaccagccacgtggtggaagcagtttcatggcagaacgggaaagaattattttagctcacagatttcaacacatggtcactcaccctgttattaggaactgctcactgcatggtggtagggaagaaaaagaggaggaggaggaggaggaggaggaagaggaagagggagagagagagagagagagagagagagagagagagagagagagagagagagagcagccaggattctagcatcagggacaagggacatacccccaatgatctaacttctttccagtaggccctgtctactagtgattcactcactctacaaagtctgcatttgaaacctgggtctttgcatgacattttagataaagtcatagcaatatgggtaggtatccagggtatgtgataggaatgttcttctgtatatatgtttgtcttatcagttgatgaataaaacactgattggccaggcaggagacaaggaggattctgggaaatgtaggcagagagtagtagtcatcatgtgaccccaggaagtgatgtagctggacaaaaactgccactagctaaccatagaggtctggaggtctgtacagacctccagaattgacaaagctaggcagaatcagtatataagcagggacaaacaagaaatctctcttctcttctctgcagagacattgagcagtctcgatgcagcaggcaaaggagttgcaggtctggtaagccaagatcatgtggaagtacatagattagtggttatgggttaagaataagacgcccaagtcaccagccaacatatttatactaatatagtgtccgtgtgtttctttggggcagagaagggccgcaggacctgccggaccagaaaattcacattacaggtatggtacaccgaatacagagagatactttttagaaatcacaactccaattatgtgccattcctcttatatccttgccttcacctttctgcatttacaaatgtgtcccctcacagtgagagcgctgctctcaaccatatcaattcattcacccatgtttctagtttcataaaatctacaaaacagtttcacagcaattctgtctatgctgctccagaaacaaacaattaaaagaggtgagtattaattctctccattctctgcactactcaagtcctgtcacagcatagtctaattctttctcataaatcccttggttcatatacttttccccctttcagtgttgattattcatttgaaatacaggtaagtgtatttttttagcttggttttgagtttttctccctatgtttgttgttttaatatttacatatatggagaatcaacaagcttttgaacatcatttttcacaaagctgtaccaaaggtgttatcacaaagctgtaccaaaggtgttatcacaaagctgtaccaaaggtgttatccctttcatatggcccacttcccacctagtctataaagatccacttcattatttctcaatagaattctcctgtatcttttctttatgtatttattctttttatatattctgcatacatgcatataaatgtatattcacatttcccctttatttcacaaagggtagcatgctatatgtactcttttgcactttgtaaaaaggaagattactttgagccttgggaaccagggttcttaacagtctgcatttatttaacctgtgtctcttccaaagagcctactaaatgaacccttgcctacaacattctaggttcacagcacccttcatctcaggccatctcttagcaggacactgtcccctgtgccttgtccacctctgtagagtatgcagaatcctgtctaacaatgcctttgatgaagctcgaggaccctcacctctaactaataccacaagctggacaatgtcctgatgtgccaggtccccttctggagaaactggccagaaacagtctttttctcaccctggtcagagctttacacacacacacacacacacacacagcacacacacagcacacacacacacacacacacacacacacacacacacacacacacacacacacacacacaccacacacacacacacagcacacacacacacacacacacacacacacacacacacacacacacacacacacacacacacacacacacacaacacacacacacacacacacacacacacacacacacacacacaccacacacacacacacacacacacacacacacacacacacacacacacacacacgcatgcctcacacctaagttgtcttgcctcttcttttcccttccccaccctcacccttactttgagaggcttggaggcaggtatccttcagggacagtgattcttagaagggaaagatgtttgaaattgctgctggctgagcaattcattagcatgagatatcaaagcacactcctaatagggggataagcttgagttattcacttctaccctctgacatcctattgtcccgctctagatgccgttgacatgagaaccacagcttctatcttacagtgaataagagatattgattctagagtcattataagtaaccatagcctgggagcacagatttagggtaccccaaattccatgttccaatgtggtaacagattcatgaggttttaaagagcaaagaaggtcatcagtcaaggcaagtttaaaatgcattagtgggcacatcagagaggtaggtacagcaagacaggatgctgcccagcagcccaagatgctatctgatggcagtcctagctttgggttggtggaaattgatggtctgctaagttaataggttcaaagctttctatctattagttacaagatgtgagttcagaaacagaagtgggcaaggaatggctattccagaggattagaactagcccccgataaggtggttagcttgttgacctgcaacatcccaatctctccatggtactgagattctaatcaattagtctctgaagacatggcttctttccaggaattcctattcaccatgcctagagaaggctgactctcatgatcagtaactagagaccaggtatggtcggtggtccgccacactaagtggggtccagcaaggtaaacagaggcagtatggagatttgaaacaataaccacagaggcctagatgcttggccaggtaagcaggcagcaatgagctgtccatgttttgccttcaccctggaccattccctttaaaccttagtaacaggtgctggagagatggctcagagatgaagagcactggctgcttttgcagaggacctgggtttgagtcccagaaaccacatggcagcccacaaacacctgtaactgcagttggagggaatccaatgcccccttctggtctccacacccaaggagcacatatgtggtgcacatacatacatgcaggtgaaacactcattggtataaataaataaataaatgtataaaacttcagtaatatccaacattgtacatcctgtgttttttcaaactaacccttaaagggggagatatggtgggtggcatcctgaagatgcccgttgtagctattgtatccatagggaagcaaggaaagggcaagtctcatgcaaaaagggcctcacagggttaacactgcaaagcttgcacaaaggatggaagagggcaaagcaaaaatgagaaagaggttgcccagagtggaggagggggaaccttgcatggtctccttgcatcaggagatacatttccatttcagagcaaaccctgctacaaatggcatagcaaggagcatgtccctacttaggcagcggatgaaagaccctcccaatgcctttgatgcatattcgagtacgtttgaaacgtgcccagcctgggaaccccagcagagccgggcggattgtggttggagagaaatccttgcccggaacagcccaggcctgaattgggccacggagacggtaggaggcaaaatctggattggatttgggaagcgaagcggacgctgcgaccgggctctgcaattctgctactgggtgcctcccggaggcaagggctctttgccaaaaggtccattatttgagcacatcccagccccagggctagtcactggtgggaacctgggaggggctgaacatgctgttcagaataatttaggaggcagaatattcttcctgcttggtagtgtgaaatcacttatttatggctcccattcagaccacggtttgtagataatccccctttctaagcagttgaactcatgaatgttgatcttgcaaatcaagcggacactagcagcttttgtccaccagggcatacatcgaggcctaccttctccccagcacgtttctccctcatcagcatgcctgtcccagcctcttggattcccaaaaggcttgctccgccccaaactgacctggggtctccagcaacaatcaatgggcttgtctgccaagtgcttgggccaacttggaacgttcagctctgggtccccagagaagctgcgggacaaatggcactccccacccaacacacacacagaaggaggtcacccattgaagggccccctgggagctggagaccttcaccttgggtgtagacttccatccttaaacacgcacagcatagcaagccaggacgaaacccaagatctggagaaaggaataaaacaatcccatttatatgacggcaggaccaaagacagaaaacacgatgcgagccaggatgcatagatccgaaataatgagatcagatgtggatgccaaagacagcccaggagccatcaataataagactttgctgaaagcaaagtagatgattggtgtccggagtgaatacagtagtaactctggattgtggtgtggtaagatgcctttttattaatgctaatggactaatgtttattaattactcccctctccagaagatagctgcaacgtcacaataaatatttttggagtcttcttcgataaatgtgacccctgaacatctttaggatcagagtggttcactatcaaggtggcgctgtgggaaagggcgtggctgcaaatactttatattttttatttattttttttagaatgtgtgtacttacatacgcttgtgcctctatgcccgagcaagtcaaaacaaggaaatcattgtatccctggagctggagttagtcttgagctccctatatgggaattgaactcctgtcctttgcaagaactgtgcatgttcttaacagtggagccatctctctagcctcctttgatactacattgacttccgtgtgcagcacgatgaagctaacctgtaaatgacaaacatggcctctgcttcatcactcagcaagccggaacactgatcctcagcatgtcttcaccaaatctcagttccttcctgtttctttcattgccatagaactcaccagagaagagactgcaatgaaaggttgaagtcagattttatggatgaagaagggatcagagggaccactttaaggctgtcacaccttacttgaataggaagataggttgaaaaggacagtttggttagaatcttcactctatattactgttgaccattttcacatcaattatgtttctagtcctgttgtcatgggtgggcagggttttgcctgtgtttctcacctgggtattttcttggatcttagcatcttctcttccctctgttggttttgacgatgtccaacaagctgagttatgtctagtgtctagcctcagtcctcagtcttcaccccctgcttcctccaccagtcttagaaaaacagtctctctctctctctctctctctctctctctctctctctctctctctctctctctctctctctgttttttgagacagggtttctctgtattgttttggagcctgtcctggaactcacactcacagagatctacctgcctctgcctcccgagtgctgggattaaaggtgtgtgtcaccaacacccaaaagaacagtctcttgtcagttccctacggttctgatgggacaggaccaatggatgatcaatgaggcataatatcagcgcaatcatattgtctcttttccagaatctagaatctttatgcatgcaaaaccaaaaagtagctattgttttattaaattactatgttaatatacaaaccatagactatgagaaatcaggaaacttttttattgtgaattttaacaggatccaggagattccatagaaacttatattttatataaatttaacactgtgagtatgattactacctaggtcaggaaacttgtggtcagagataaaatcaagctagataagaacaaaaacattgtgcttattttgagattaatagtatttctaactagaaacacccaattcaagcagccttgagaatgtgctcagtgcttattctgtatgtggggcattgtctcactggttcctctcctctccaatgaaaagtttgcagaagagactggacatgtaccatgtctctggtcagcttagggaaatggagttggttttacaaactggtccaaaggtaagtgaatttcagtctcaaggttgtttttgacagacacaaagtcctagaatagatgttacattgattttttgctgtttttcctccttcaatattatcagtatggatgggcattctccttacccactggttgccccttcttaatgatagcaacagccttgatctctgctagttgctctcttgacattggtggtaattgcttcttgattttcctctattggtccatcatgtaggaattcacccctatagattattgttagtttcatctattttaaacacacacacacacacacacacacacacatatatatatatatatatatatatatatatatatatatataaaaagtgtttttgtaaaatctttttatttagcagtatatttatgaaagttacccatgttttatttgaagaatatcaatcttgttgctggactgtagtcaacttgctactgtgtcacagtttcttgtttgtgttaccccatgaggatctgcactgtttctgttgggattgtggcaagtggcctccctgacccacaggagtgcatttctaaagatctcactaggaatacaactgcagggtatgaaatttaggtaacttcacctttgccagacaagccaaactattttttccaaagtggtttaattgagatggtgtctatttagttaacattctattgctgtgaagagacactataaccgaagcaacttacaaaagaatgaatttaattgggggcttgcttgcaattttataagatgagttcatgaccatcatggagggaagcaaggggccaggcaggcaggcaagcaagcaggcaggcaggcaggcttgtatagagctggagtgttaactgagagcttacatcttatccacaagccagagacagagacagacagacagacagatagacagacacagagacagagtgacagagactgagcctagtgagggtttttgaaagcttgaagcccaattccactgttacacctcttccaacaaggccacacctaatccatcccaaaacagttctagcaattagggaatcaagcattcaaacacataagcctagtgggccctagtgaaccgttacgattaaaaccaccacagcctcttattctagatcctctctgtttggtatttccatcttttcaaacttttgcccacctgatgcctttgattttattataatttccagacaattattgacctatgtactttttcttatctgaattaagattttgtttcccaaactactattttacacacacacacaaaaaaaaaaaaaaaaaataggctagatctatgttataccaaatttgtttctagtcaaccatcaacttcaaagaaaattgtttctgaaggttcctacagaatatatttatttaatctttattcacctcaagggacattgctgtttttaaattaggttagctaaataacagaaattcctatttgtagaattcatttgttgacttttcacttgaagataatccaacccaaaacttggcattaagtcctgttcttactttgtgcctacttcatggacattgtagccttagaagccagcactaaacagctatcctaaaagaggcctacagtgaaatgaaacaatctgggactatttcatgttatctcaaagtggaattttgtaataaaaatggaataccagtcaggaataaccaagtacaactgcctcaactatattcaacattcagtaacttcccctcattctctctcgccatcagtttgtctcctatgtctttttctccagggtctttagagggtaatgacaaaatataaagcatgatgacatttaatgagatggctttggggttctagtttagcacaagtccatctagtccattcacgttatattcaggcaaataaactctctatgcccatatcatgaaattttaagagactaaactcaaagtaatgatgagatttcaagatagaacaccattaaggttgccatgtggttgctgctcactatgttaagccaagtttcttctgagagttgagaatacagagtagggaagaataatatggagaatgtctagtttgtcaaggaaaagtcatgaatgcatttgaaagtgcagacaactaaatgcaggcaaagtggctgtaattgttataggaatcattaaacactagggaaggtgccttgagggaagagtctacccgatgaaggctccagggagcaaaaatgagatcttatttgaaaatctttcatttaggaagggagcatgtggggctggaaagatggctcagcaataaaaaggactagctgttcttctagagtatccggttcaattcccagcacccacaggcagctcacaactgtctgtaactccaagatctgatacccccacacagacatacatgcaggcaaaacaccaatgtacataaaataaaactatttaaaaaaaagaagggagccttgatgcttctctgatctttagcttttaaccccaatctctgtctctgggtttttattattagtaccaactggaaatagtgctccacagctgggattctaccttgatttactcacatctgcctttcagagtttgattttaaggtgtcatttaactgcctgagttaaatttatcagtgacttctgtccatttatatgtgtatgtgtgactgagtgcgtgactgagtgtgtgtgtgtgtgtgtgtgacagagagagacagagagagagagagagagagagagagagagagtattgaaatccatttcaaggtgtccaaaatgttttgttaccatccctctgaatgaactttcaaccccctttgtaattatgaagtccttcttgcatcctaatagaccaaacactcgttttttgatgttgcctcgaagctcccataagctctctcatctcccttattttgtttcttcttctgtggctgtgtattttcaaatagcctgtcttcagactcactaattcttgcttctgtttgatctgtgctaccactgcggccttctgttgcatttttaatttcaccacatgctactttcagttcaagaccgtgtttgatttcttattaattgcttccatctctttgttaggtgtctgttttggggtaccccccaactcactgaatctcttcaaacagctgttttaaattctttgctagtgctcccatgccgagggctgtctggtcagctgctgacactttgagtactagatacactcatgccttctgaaagctctggatgtttgtcagtgtgagacatcacctgggctctgaaggagccctatttattcctgtgtcatggcttaaatatgaaatgtggaatatttggtcctcagctggtggtactattagaagaggcactaggaactttaggagagagcccagatggaagagtgggcccttgggaaattcctttgaaggttagatctggtccccatactattctccctcgtgtttcctgggtgccttaaacattctattctatgctctcatcatacctgtccaaagtctctgaagttgtgagctaaaataagtctttaacttctttaattgtttccagctgacttttgtattgttttttacagtaacacaaagtcccaacacattttattcttcttcaactggcattccgtgttgtttgaggcagagtctaactttgttgctaaggctggattggaactcactgtgtaactcaggctgaccttgaacacacaatcctcctgcctcatcctcccaagtgctgcgattccaggcagggaccatcaaagccactctaagtagcctcttcattttctctgaacctattgtcacttccactagatcagcactaggtggtgcccaggtccagatttgccaggagtatgctgtcactccctttgtactgaagggcaatccaaacccaaggttgtcccaaatagtctgttagtaaattgtttgggaggcaggggcaatatctaaggaaggcagcgtgtccccagaagccctctccctgatccgggataatcccagatggctcatcaataatcacagactggtggtcagacaagccagggttttgtctagttctgggtggtcatcaaaaagagaccacctttatcttttatgtcacatctgtgctcagcaaggtcataaagctctgatcccacagcccacaaagatcagcacaataataacaatagaaccaaagtccacacctctatgagctgtttgctgcttggatggaccagagggtccaaggccattgagatgggtcatctgtgacggtggctggaagagatgtggatgagaattctggggtcacttgtcttcccctggcattagaattgctccagaggctccacagggactggacctgagattaactttcctagttccagctctaaatcccagcatatagtcagtctatgacttctaacctgtccttcttcctgaaacaggtctctcaccacaccatgctgtctgcagttgagctagtcctggtaaaggcagaccctggaccacctgggctgatgttaaacttggccgtgcctatatttctcagctgcaaagatctgcactatctcaggagtgcaccaagtcttgcggcgcagtcagcaatgatgcagactcaaacgtgagtctgtcccactgaggcacaggtgtgagcactggcctgatgacactgctagggttcaggggatggatagtaaagagaaccgatgggccaccaaggccaacaataaactgggtgacagctgagtctctctgccttcggagtcctgggaagagggcaaatgttctccaagccccttccagcacctgggttagtcccacacacatacatgtctctcctgatgccagagatggtcaagaagctctgtctgcaaatgggccctttagttactattgtgtgcttggtctcgctatagagagtatgaccctgaactctgagacaaaaccctgtggtagcttatgtacccagttccccagtaggtaaagtcttgcatcctgaggctgaaggaaggggaggcagctatctctttgcacatggccaaatgcacttgcagtggctcagtctataggttagctgtaggataaggctttggtcaatactactttttacttactgggtactgagtactgggtactgggtttcaagtctaggacctgggctgaattctcacattcataagtgggatcaattaatctatctatctatctatctatctatctatctatctatctatctatcttcctccctctcactccttccctccccctccctcccctcctctttcccactctctctctcttctctctctctctctctggacaaggtagcttgaagttgagataaaggtataacattttgctatttactctcttcagcgcattttttattttgtttatactaaaggcaggcaccatggaatcacccgatttcctgagttctggggttggtattctggtgcataagcaactgtagaacttccttgacaagcataggtagctggcaatgtttcttaaacctggctttattaatgccccacaattatttctcccagctcctttaaatgtatttttactgaatagtcttaccccacatgaaattttaatacagtggatattctgcagacagccctcaagatctgtgggttccatatgtctaatatgacaagaaattagaaatatttgagaaaaatgcatttgcattagacatgtataggctcttcttgtcattacaccctaaacaagacaatataagaatcattccatttataatgtattaggtattataagtaataggatgatttaaaatatatatgaggatgtatgtagtttcattgtaaatgctgtgcccctttgtgggagggacttgagtgtctgcataatttggtattattgaggggtccttcaaccaattttctacacatactaagggaccactgtatctgtagttatgaccagtgtgtagatctaatacacacacacacacacacacacacacacacacacacacataaagtttttgttactcttctcctgccttcaacctatttagatcactggggggacaatactagccataatgaggttatataattgagagactaagaaacagatttttgagaattattcattgtggggttcattgtgattttcaatctgactaattgagaagcaggtaggaggttagtgtgtatctggtctataaagctattgccagagaggagtgagacagggcaaaggagaaatcaggcattccctttcttcttcctgacctctgtcgggggaggcactctgctccaccaggagccaaaaataagtcctcttccaaaggatttcgtttgccagttactttcccaccttgatgagaagtctaacttacaaatttggcagcagtgaggtggggccattgctataactacctggctgtacagatgagaataccggggaactggtttgtgggaggagtctataaaagcttggaaatatgtgctagagagagctaagaagactccaggaggagcctaaagcatgattctattgaaagctcagaagaccagaatgctgggggcaatgtcagcaataaagactgtagttgtggagttccagatagagccaagggtacaactgagaattaaaccacaggccatttgtgttctgttgtgtcaaagagtttgtccacatcgtgtctatgctctgagactttgaagctgagtttaaagaagatggatcaattaatattatgaaaccatccaaggccacctggtacttaggctgcagcacagtggttgctagacaccttaagacattttacaaggaaaactaagaataaagagtagaacagaaaagttattctgttttcacttttccataaaaagaagtgtatgtacagctggggctgggggaagcatggctgctgaagaggccagggacattaaaaggaaacaaaatatttttcattgggacaatagcaaagatgtcctcatggaatcttggatccatctcattgtaggcctaagggtgtaaagatttttaactcatttggaagaccttgatttgataagagagctctgaggtacactgacagaccaaggatgtcataggtaatttcttttttagtttagccatacccagaagccactatagacacgggtctaaaggaaacccagctactgttcaagctggttgcatatcttgatgttatctgtgcattacttggtttgtcaggcatgcagaatgcaataattatagggttattataaaagcatttacccaagttttgaagagagcataggagaccagacaatgtttagcagggtcagaatcgccataggtagctcctgagaaggagatacatgaaacttgaggaagaaatctaaactgcagtgaccctagggtatcattgatatcaggaatgtggaacatctgatgaggaaggctagtatgcctgcagttagcagagcccatttaagtgagagaccatatagctacaattggcaaaatccataggcagtttttcccaagttatttggagctcatcaccatatatccaggttgccaggcatgatcacacagggtttagcatttggcctgctggctttcagtcttactctggcctgttgcctcttcttttcctattttttctcttttgaaatgggaatgccattgtatgatttaattatctaacttccctttggattttacaaggactcatgggtaagaatttaacatgagtcttagagaagactttaaacttggacttttgaacagttttggagctgttgagactatggagactcttggagatgaacacaacacactttgcactaggaaatggacatgagcctttagaggaccaagagtagaatgttatgttgaaggggataggtttgggtgtcaggtctgagagagatgggctcaacctagaaaatcttgtcaatggggttaaattaagaagcacacaaaagattagtaaggtgaatttctgggtgtttccatggaggatcaactcaggaaagaaagaagaaatccatcataggcttcctttctttttgcttcctgggtaccatgaggtgatctgttatgctctaccatacctctccactaaaatgggttggaatctttgaactgtgagccaaaataaatcctatcttccttaacagttataacagttactatgtcatagcaacaggactctagttacagcgatggaagtattaaggggtaccatttgagaggagacaatgctaatactttgaagcaagaaaaatgagactgtgagtctttaacaaggtagatacaaaattgtgcagtgtagctactgatccactgggtcatgctgttaatggtgtgtagagataactaaagttaaggaataaagttaagtgaacagaacattagttagttcggagaagtggaatgtttcgtttactatatgggaaaaatgcttcccaggtaaataattcacaattcttatgcagtcattatttctcttttccattatcaacaaattcatattttgaattattttctttatatatttttgtaccttttggcggggtccaatcactgtattatttctccctaatttaataagaggtttgtcttgagtttgaactttgaggaaggcattcactcatctataatgtacactggtctttattgttaagtgttcacacttttactttacaactggaaaaagaatagatattttataaggcattttgaataaatacaaacatgaagctttttaattgagtgaggagtggcagagttcaaccctggaaattctcactattttcttgcaaatccttaagtgtcccctccacccagccactagctcctctgatactcctgcattcacttgtcccgccctttgggcaagtcacttaattcatccatcctttagctgtacctacattttcagaattgagaaagctgctgtaccgatggctgcaggaaggataaatgtgcaaagctggtttggaaaagcaaacagtactgcacaaatgaagtaaatggtggcctcgggccatcaatgagcacttattagtcacctttgttccctttctgcactttaacacacagagccccaaaaggaatgagacactcattttgccctcatgagatcacttgcagctttcctgccaacatgccttcctggtggttttcactgcatgtggattcctgtctcccaaaagagaagtgatggcctgtctagataggagcctgggaagcagggttcaggcctcctgggacctgtgcttagtggggaaaggtgttgtggcttagaaccgtatgtttctgtgttgtttttgaatcaccatcacctccttatgaggtgacatctgatcacccagctgcctcatgatctcagtgtggtcacagtgggactctgcacatctgggcactgacaccatttgatcagcactggagtgccgcgccttcgacagcaggttcttgggggctccatgatttcccctgcttgcaagttccaagattcctgatttaaattacaagctgactgtcagaaagaagaattgatggagaggcgctggagacagtgagtcaggctctggactcagcagagtcagtcctaatgtctttgtcatcagttaccagctacatcataaacctcctttgaaatgaccggtactcatttttcccttggctttgtctcccataaaatctcaccgatatccagtggggagcaaggctggccctttcctatgatccccaagtttctctactctccttccatcactgctttcttctctcacaagccccagtgcagcaccttttaggactctcacttagcaacacacagaaactaaaagcaagtgtttaaactgaacctgctgccagggcatgtgggcctgagagtgctggaggcttccccatctgtttagcatggtccactgagcagatcccattaccaatagccagctcgactgcagaagggagaaaatctggtcactgcccactggggtcctgaagtcacaggcttgccaatacctccgggaacctgagaaagcaaagccagagccagggaagggtctggctgagagtgtggcttaataaagagccacataggccaccttagccttggggtaaaagaagtatgctggaggaagctcccctggcaggctccccctgaagcctgccagtcttaaaaaaaaaattgctttcctctccaggcaattaaaaagccacatcctcatcacatttgtgtgtactgccctcataaaactgcaagtaatgcacttctgcaaatagatgtggctagtcccccaatctcgtgtccatctgggctgaagctttcaagtcttttgctaatgaagatgtgacatgggccagctggttagaagtggagcctggaggcaatggaggctcaggttgctgatggcctgagagaaatggctttactctaatggtgagtacttcactctgtgcagccagtttgctccactcaaggagcccttcaaagttcaacagctcttaactggtcaagaaaaaacggtgtgaagctggccgtggcattgtgacatgttcttgatttgatttcatgttcttgaaagaattcaacaagttatgtaaaatctgagaaaaatacgctgaccttgccgtttcacgaggcccatagacatcagacaagaagggcaagtggcccaagaggccccacatttcatcttttggagatcccctttgtatctggcactgttctgaaaagcacagcctttccagtcatcataaccacatgtttataatataaataaatatggtatcatcttcaccatacttgagatggttctttacctagaacactctggtaactttttaaagagccagccacttcctggtacggttgtgcatgcctatggcagattcagaaatggtggtggtgccttagcctagtcctgtttacagtacagttgttccctccctactcttgacaaagaggaacctgtccccattcacttgcctctactctggaacttccatctctcttcccatggagaatcaggatgttcacacatggtttgtccagttcctaaacctatctttaatcacagagaaaggcaagagaagattaactggctggtttcaaaacgttttatatcctctagctacaaaaaataatgatgtaccaaataattgttgccaaatgaaacctgattcctcagccctcctgtcttggctgcttcctgagccagccactctatcctgagcaacctgcttatgatgagagctttttctaacatcctcagaattggttcaccaaccctgtgggacttctctgtgaacaccaccatactggagccttgagggaggaggtgagctcttgagcagtttcccatcattccgaagcaccagtaaatgttaacaagacccatacaaaaaaatttccatggcccaaagggtttaggaactatcaaattccaaatgttccttttggaagtattcattgaaaattatcatagtaaaaactttatgaaatcccataataaagcttttaacccagaactttccaaaggcatttgaccctagaatgccttccacctagacaacctcaacaaacactttagagggatgggccacccctggttaagctgttaataactgaacatggatttaaacttattattaaatgaggctcagttatggattattcaggggcatcctggtctagaactcagtggagcatagttagttctgattaagtcccggtaagccaagccctgtactaatccactcatgcctccttcatgtcaatcaatgctcacctcagcttcatgagcaggaccctgtatacatccaattttgtaaccatgattttctgccttgccacagtcccaatgtgagtaaatcacctacgaaggtcatgtgatcttggtgagtaaatatgagtgtgagagtccaggttggcctgacaccagtctgtgtccttaatcagagagccctctgcctcctggttgatgtcagtcttcagtgagtgtgaacaagggctgatgtggatcaggagtgcagaagttgctaacaggggactctggaattgagaatgtggacgctttgctacattgcctctatccaggatagttgctactgcagccaccggagtggtgggactgacacagtatctcctgtgaaggatcctaagttgggaagtcagagctgccagtctcggggccagtcatgggcttattttgtctttcccattctgagaaactctgggttaagcctcaaaatgaagatgtataactgctgaaggcatgaccacatgtcatggaactgagatagcatctaggtcagtgtggtccccagatcagcatcatcagtatcaactggatacttgacatcattccagacctactgagtcagaatccctggcagtggagcccagcaaattatctgaggagctagccattcagataattcttagttactctaaaatgtgagatgccctgctctaattagtccaaatatctcatttgatagatgataaaactgtgtcccagagatcacgtgacttatccatcgctctggggtgcgcaatcggtagaactacacaggcgcattagagctttcacttatccatacccctggtttttcttttggtaacagcacccagattttccttgttactgcttctttctcattttgtttatgtgctttgcatgggactaactcaatgttccaagatttaagggtagcttcatgattcagtctggccaaatagcctaatttatcacaactctaatgccagcctggccatggacgtataactaagccagggcaatgaaactggcttatggaaatttttggaatcctaagaaagaggagtgctcttttatgaggctgatagctatcaggatgctttgcatagcatggagcccacccacaaagaagtcctgtccagtcagagcggtgcttctcgccttgtttgccctcctgtgagattgaggattttgatttgtaccgtcagctcaatcgtcctgcgttcagacacacggtttatacacccaaggggactgtcaactcgtcttgtcatggcatgcttcctgatcatgcatttccttgttcagacttgcgatttatatggaatttactaaacatggcaatggtcactgaacactaaaagccaaaatgtgaactggcaccagagtcattaagtctttcttaaaggatgctgtggttccaatcttgtatctaaaagcttaaggtactgggagaggtagagatatttgacggaaggccctggctgggggattaagtcatctggagcctgaatacccttgaaggactcattgagaccctgggctcttcctctctctctctctcatttcctggcatcataaaataaatggttgtgttctgccacatgctccctgccatattttactgccagtcccaaagcgatggcccaacctctaacgctgtggaccaataaaattctcctccttataagcctattatctctggcattttgccatagcaacagaaaactaaagcaagtggtggtgatccttaactaataaggccagagcattagtgccactctggcccctcccactaaagagaagcatggatgtcagacattctaggatgctctccaacccctccagagaggaagcaatagctcaaggctttcatgatagtcctgcagtgctcacactgcataacttatcaaaatacttccaagtgtcaaaatattatcactttgaaattaaaatcttcagttccattcctccctgatcagttcatagtcagggggaaaaagcagtccactgagaaagcaacctccaacccttggcatccaagtggaagagcacatttggtgaacagggttttccaggtactgtgatgaacttcagtaagcctcatctcctaatcctggccctgtgaggtgctggctatgttaactagcattctgtacatgcctgctgcaaaccaggtactgtttccagtactcacagatatatttaagcacgttatgcccttccttgttatgacaagggttccataattatgaaccatcaagcagacacttctaatcctaactgtcgagcatagagactgttcacttaggcggtgctgccacagcagacaaaacccacaagataaagatatgaccctcctgcctccttttagtagtcagtaaactaaacgtgttcaaggttggaaccttcacctgtgaaagcgggaactgaaatcagtgacatctaaggttcttttgcttttgactctattcccaaaacactgtagctgttttcactacccacaaagtaatgagacctcctgaactttctacacagcagggtttcagaaatggaagccggctggggatatgaaattaggaaacctgatagttgattgtgtgagccacatgcggtaggaatttggggtttgtgcttatttagaacagaccacggaagccaagggttgagagacaaaagggccatgcactgggttcccagaaacttccctagttgtttacacgccccccacacatacttctttcaagagggtaggaggagggggcatctgctgctgttggagagcctgctttaggtgtggcctggagttgagggagggattctgctcctccttagttgtagaggttatacagccctccagagaagaagcccagggaaggccgacagtgagtgtatacgtagtaaaatactcatgcttcagccctggattcaatcagctctccaaaggccatcttagcttgtagtgaggttctgtattttatccagtaaaaacctttctgtgcgaaccaaacagtacacaagaatggggaggtgctggaggagagatggctcagtgttttaagagtacttagtgctcttccagaggacctaggtttagtttccgtatccagtgattcactactgtctattctaattctagctccctctggcttctgcatggggtgcatataaactcactcaggtacacacagaaataaaaaatgaataaagactgggaagtgcacgagtcacctccctgatgagccatctctccaaccctaatactattctaaataggataagaaaagcagtttctttttctgtttttttttaaagatttatttatttatttatttatttatttatttatttatttattacatatacagtgttctacctacaggccagaagatggcaccaatctcattatatatggctgtgagccaacatgtggttgctgggaattaaattcgggacctctggaagagcagctagtgctcttaacctctgagccatctctcaagccccacaaaaagtagcttcttaagatttactccttaactgaccaaatatataatgatatgtatttgttacatgcatgctgttatatttttaaatatcatgggacagctaaatcaagtaacaacatctatttcctcaccgacctatttatcttcatttattgtgaagatatttaaaaatctacccttaccactgttttcagtcagatactattttttaaaatttattattatgtgtatatttaggggtccagatacacttgggtatgtatggtgcatgagtggaggtcacaggacaactttcaggagtcaggtctctccttctatggtgggtgattgaactcaagccatgaggtttgcgtggcaagcacttttactctgggagccatcttgtcaatcaatcccagcctgtcattaatataatcatcatgttttacaatagatataaatgtattcctttagtctaactgcagttttgtatcttttgaccaatgaccttctgatccctctctattatgcccagtccctggtcaccaccattccattctatttctgcaaattcaactttatttttcttgcatataattgacatcttgtggtatttgtttttgattcccgaaatctttcatataacataagatcattcaggaattttatcatcaaatagtattctattgtgaagacctactttttttttcttttttagctgctcatccactgatgggtgctttgcttgattccacatcctggctcttgtgaataagatgtcagtgagcatagggacccacacgtgcctttgatatattggtttcatttcctttcgatgtcacccagtacttatacttggtagttgaaccgcttggtcgggtggcagttctagtttgagttcttttgaggaatttcatattggtttccatagcaattctaccaccttacattcccaccatcaatggacgttcccaccaccaagggacaaggttccctttagtgtacatattcaccaatgcttgccatctccttttccagtaagtatatatcagctgccctaagaggtgtgaggtgacagctcactgtagttttgatttcacttagattctaactagcaagggtgagctttctttcatatctctttttcatatctcatttgcacatcttcctttaagaaatatattttcatgtcctttacccatttgtgattatcttgaatcaagttctttatatagtgtgactatatagtgagagatatggatatataacagtatatttagggtggtgatttatttattttgttatacataggctatttagtttggtgaaattcccatgaggttgtctttgaaactgtgaactgtcccaggtacatgacagacagacaaacaagagaagtacaggagtggaaattcagctatcattaagatggatagcatttacagagttcagtacagaaaatgttggtttgaagggtcaagctactggccatcagtgggtcttgtgactttcataggcttctctaagatgcaaaatttaacttgccatatgcccagtgaaaaagtggcagaaggaagattacagctgtctgaagactctgagctactgatatttccttcagggataatgaaaagctaatatcatccttcactcttgcataaccttcttgggtctagtttgtatgcatgtaagtaatagtcattctacagagtcagggtgaagtagaagccatggagaaactggaatctcaccaatgagctacaagataccactgagtgatgtgactgacccccacaaaatactttatgattaatataatatattctaaatcttaatctagattagcttcataccaaccttctaatataaatctactccagctattccttcctccatttctctagctatggttcttagggcttctcctgatctcactatcccccctcccataccctttcccccttacatacatccagacaaatccctcatgctcacctccattaaatcccaatctttcaagctccatcactttctttgttctagtgtctgaggattgcttttgcagccttttccttgcttgggtacagtccataggagcctgatgatttggcgccctccaggggcacttttgtcagccccatcctacttggtggtaaagggggaatgaatacttggcccagaacaaacgacaggcttcctaatgtgacctaggattttatttatttattattcttaatttacttttcccttccctttcctccctccatctcctctgtacccctccccactctcaagttgttagcctcttctcctgtggtaattactattatatgcgtgcgtgcatgcacaaatatatttaaaaacaacctacagagtctgtttttgttgtttgtgtatatatgatttcagagctgaccaagcttcactggacaataaataagggcattcatccctgggagaggctaattctcctttgctcagtagtcattagttgcctgtagttctttgtctaggcatgaaccccataaaatttcccccttaccatgttaatacatttattgatattgtcattgttccagtcttgttctgggagagactgtttcatagctgacttcttggtattctggctcttacaaactttccaccccctcttctgtaatgttctctgagtcatagatgtaggagctgtgatgtagatatatccactggggctaagttccccacagactgtttaccttttgcattgtggttgtggttttctgtgatggtctccattggctgtaaagagaagcttctttgatgcgtggtgatagctacactgctttgtgctgctttgtcatcagaaagagtcagaaggaggaaaggtgaagctcctggtagctcttggtataactgacaatatgagacttgaaatgctgagatatgattaaaacctaattctgtcgtcccttaatcctttgatgtcagaggagagccttaggttgttttcacctgtaaaatgtggttgataatatataatttgaacatgtggtatagaatgaaattggatgatgatttagagattagtgtcaaaatggcccagagatgctcatattcttggtccccaagtctttgggggtaagtccttggtatttggggaagtgaggagagtgaagacgaaggcattcctactcctaggaagtcatttcttatcttggaagatggaacaaatccagaaagattggtacatctcagaatagggacacggatgcctgggtctgatggtctgtgtgtatgaagcaaagggcctccatgatataccagtccccagttcatgatgccgactgcccagcttcttctctagagagaaagtcattttctgtgggccttgagcgtgtatggtccagtcagataaggatgagaagctcttgtttgagttttccctgtggctttagtcatcacaaagtcattgccttggcaaaaaaccatgaactttatcactgtttcttctctgaaaatcaggtcatgttgttttcaaaggaagttgtttgcaaagggaaaactccaaaacttgccagcattctcatagcaatactatcaatcttccatgtcagagctcctagagaatggtttgtccgcctcccattcctgctatttgcagtgtgtcttatggaagaggatgggtgggctcagatagaattgacctgtgtaatgaagagcccaaacagagcttcagagctgttaagcctcccttggtggagttaaatcatcactaggattggagccatctgcagaaagatgagctgagccgtctgctcctaggcgttggtgccttccatcataaacattgcagactattagagttaaaaagaaacatggagctttttgtaactccagccccttcacatgacacatgtgaaaactcagtaccagacaggtggtgagtttcccatggtcactggaaagtgaaaatattaaggcttgaacctgtaacttctgactcccatgaagaaaactgttgtctcattggctggatgtgctgagccttgtgggatgaagacataaggatggcctctcccataattacatgcccagagatggggaggaagtgggggaggggtgaatggaggcccctttacagtccagggcagatgttttggtacaatagactgtatcccctctggaactctaagcaaagatacacccacccccttctcctcccagttgcctgtggacctggtattttgtctcagtgttagaagagaaacaatacagaggtaagttcatctcaaggaggaaggaagttctgagtggagagggaccatgaagagtaccatgtgtgtgtgtgtgtggggtcatggcacaagtatacttcaacaggaccttagcaactaagaaacacagtagataagaaaaggcagtggaagtgggcaggacatacatcacatacatgtccaccctaagagttttgaagttggccctgggaatcatggttagccactgcaatgcttttagcaggaaatgcagtggccagccttgctttcaaaatgatctttctcactctgtctgggagatgaatttgggtggggaatgtgaggtgtaaatggagaaatggagagaactagtaagaggctggtggagtatagattagggtattggtagctgagaaggtaaggtgacctcaaggggagaaactcaagaagtaaatggtgacatcattaggaactagtgcaggagcacaaaagagaggaatgacagccaccaagaaagactcccagtgatccgttggcaaggatgacctggagatgatgtgtagctgttgaaattgatgagtgtccctggcctattctgctgtagttcttttgtgtatcaattacttttcttgttgatgtcaccaaatgccttagagaaacaacaacaacatcagggcagggattatttatgttggctcctggtttcagaggtgtcagtcagtcttcaaggggagacaaagaagagaagtctttccctggctagaaagtagaaaaagagaacacaaggagaagccagggcaagatatcactttcaaggacacagcccagtgatctgcttctactgcagctccccccacccccaccagtaatgccagaagtctacaaatccatcgagggattaaacatttgactaggcagagttctccctccagccaggttgttaatcaagactaactcccatcccacatggttctttggatctgggaacatagttcctacatttatttatcaactcatcacagttcctttagggaattgctttcattctgcataattctatcaaacagatcaacaggtagaaggatacaaggtttcaaagtgaactgtgtttcatttcttttctgtaggatgcccttagctcccacatttatatcataagcaaaacactgtagctaatggaatccttggaaagagaggagtatgtagagtgatttcttttgagctttcatggggaaagtaatgtcctagcaaggtaaagcggggggaacagagtggggccaccagcctgtgggggtgtggagaaaggacagcgatgatgagaaaggataagtggtatagccagtgtaacctagatgtccccaatttctacagcacttgcggatattgcttcccttttcatgccaattggaatgaatctggaactccatctcaccctcaatttcatatccaaagtatttctggaactttcctataattcatatcctggtcacctgtcatctccaagcctgggctccctttcaggattaatgctataagttcacaactgtgagcttaacagatgctatccctgctctggtatgtggggacaatggccactgccagagtatgagtagtccacagctatgtaggcccacacagcctcccttccccaggcctgggtaatggctcattctgagaatagtaaattacaatatttaagaaaatttagcggaggctttgaaatcacaagtataaagaaattagatacaggatgtactgtgtcccagatctcatcgcaggattgtctagagcttgactagagcttgactagagcttggcacactgccaatcacggaggccatcccacttcctttcaacagtggatccatccttagacctcttccaaccagggtccaagcctctcagtgctgcagagatgagtgccaacaaggaaagggatttctagtttctcatctggcatgtaagggatttgtaaggtcccactctgtcctaaccacaactacaaagttgaacaaataaataattaatatcccatctttgtttttgtttttgtttttgtttttgtttttgttttttggttttttgagaagggtttctctgtgtagctttggagcctatcctggcactcgctctggagaccaggctggcctcgaactcacagagatctgcctgcctctgcctcccgagtgctgggattaaaggcgtgcgccaccaatgcccggcactaatatcccatcttatgtctgacttagatatgaggttatagagagaatggctacctttagaattggaaagaaaagccaaaaggagtttcgtggtggtggtggtggtggggatcagagaatcgtagaatcagtgaacggagaccttcatcagaaccagtgctgagataagaaaacctaaatgagaatccctaagcatcaagggctcagggcagacaaaattttaaaaaccccaggggcacccaatcacaagaactgcaccagttttgtgagttctacctctagatgttcactcatattatcagaaaaaaaaatttaaaaaccctaatgaatgatgacgaaaaacattttgaaatatcctacagcaattaattgatggttcttctggccaggatcaaaatacaaaggagttttctaaagtgtaaagtaataaggacatgttaaaacttatgagacccgagagggaaagaaaacacccaattccagccagtaacagcaacctcttcacatctccaaagagaaaggaggctggaacacactgctgaagttcacaggaagtacaagttctattaaagaatcaggcctgctcataggaccagcaatgctacaagatggtctcactcccacactttgccaccacaccaataacggcctgttggccatggtccactttgtttaatacatcacatatgaatgtcagaaaaaataaaagcatattaataagcaaaagaaaaagttttatgagagagcatcagaattaggaagtggtgatgttgggattgtcagcctggggagtgaaaacaactgtgtttaatacgggaaggaatctaatgaggaaaggagatggtgggtgggaacagatgaatatgtaaacagatggaaactgcaaaccaagaggaaatgctaggaataaagagtaccaacagagatgaagaatgtctttgtgggcagggcatggctgaagacttgcatcttaaggatagttcaatggacactggcaaagctgaaaaatgagggaaaatgatggtgagaatatctagaatgaataagaattgggaaacaattacaagaaaactttcactattgggaatatcagaaggaaaaataggaagaggacagaagcaggagatgaagccacagcaacagagaattcctgcaaatcaaccacagacaccagatctctccccacaggcatatgagcttcaaaaggtacacattaaaattttaagaccttgaaagaagccagaagacaaagaggtcctatagatgaacagagataaaagctatagccagcttctcttcaaataccatgtaagcaaggaggggcaaggtaccaatttagaatccgaacaagttgttatggcttacatatggtttgctatgggcttccatgggttcatgtgctagagatgtggtacttcctgtggcaatgttaagagatgatgggaggaagtgtgatgtccacaggtcactggagacacgacctttcaatgattgaaattgttctcaagaaactcctgagttttacccttgtgaaagagcaggcctagacacctccccaacccctctcccatcccctaacccccacctctctggcttccatggtcactccctgtcatgcacactgttggctgtgataccataggccatgagatccttatcagagccaagacaatattacagccatgcccttcaaagttcaagaactgtgagctaaatgaaactctttaatttggagtcagtcttgggtatttcattataaaacaaactaacaaacaaaacaaaacaggctaatagacatgttaaattaacctacaaaaaaaagtgactttctcaaatgaacaaaaatcaagagtttgttgctgataaaccaatctaacaagaaatagtgaatttttttaagttctttgagaaaagaaaaatcaaataggccagacactcaggtttacattaacagaggagcgtgctgggattataggcatgtgcctctgtgacttattttttgtgtgctggggattgcacctaggactttacacacgtaggcaagtattctaccaatgaaccatatcctcagccttcttatttatttttattgctttgatacacaacattttgttcaaaattacaacctcaatgagttctattctttatgtttatacttgtgcagatgtttacatgtggatatttctgtatgtacccgcataaactcatggtcatggcacagaaaccaaagataaatttagggcatttgattcttttttaagtcttatgtgtattggtgttttacctccatatatgcctgtggagggtatctgattcctggaacaggagttatagacagatgtaagttgccatgtgggtgctaggactcaaacctgggtcctctggaagagcagccaggggtcttaaccactgaatcatctctccagcctagagtatttgattcttataagagacactacccatgaagtagtaaagtgttatctgaatgtgatactgaatttattaatgatgtatattgctatctctaggacaacaactgtgtgtgtgtgtgtgtgtgtgtgtgtgtgtgtgtgtgtgtgttattaaaagaagaaaaaataatacagtaagacaaggggaaacagttgttcaaaatgctcagttacaaatatcaaaaagcagaagggcggaagataggaattaccagaaaggcagttgatagaaaatattaacaaatatatagataaccatccaagtatatcagtaaaaatcttcagtggcaatggtctagttataataattaaaaggaattcttttatggaatggaaacttaagatccatttataaaagaaatccacttaaagatgaaactgcatatggatccaaagcaaatgggctgagaccagtttgccatgctaattctgatttttaaaagcaaagcagacttcagagcaggaacaaagggacgtcagggacaaagatggacatcatgtcacgatcaaaatgttcatttttcaaaacaaagatcatccatagtgtctactatgtctctattcaccaagagagtcaaattatgtgaagcaggagctgggggacagatgcatccacccgtgctgttggaaacggcaacaccctatatcagccaaggatgcacccagaagacagaaaatcagtaaggccagagttgagctcaacagcatcatccatcagctatggaaacaccttattcaacacaacagagaacacgttcttttcaacccagtaaggagcaatcatccagatagatcgcatacaggccatcaatcacatttttaacaaatttgaaagaatgctaattcttcagtgtttcctctcagacctcaatgcagttaagccagagatcaattaacaaaaagaaaggaaaagaatatcataacatttggatgctaaacatacttctaagtaatctataaatgaaagactacatttcaagataaattttaaaatttgaaattaaagggaaataaaaacacagtttactcaaaattggcccaatgcactgaaaacagtgtattgttttgagcgtgtttattagaggagagaggtggaattagtagttaacttctgccacgtacaacaagaaaagatgatcaaattccatctgaaataaatgtggggaaaataagtaacacttggaacaaaaattaaaaaaaaaaaaaagaaaataggaagctaatagagaaaatcagcaaaagttggttatttgaaaagatcaatgaaatcagattatatgtggtggttgctcttgattatcaaattaattggattgagagataccctggtggggggatgggaaagtttacttctggttctatctataaaggagtttctagaaattattatatctctctctgcttcctggctaccatgatgtgaactgcttggctctgacacatcctccttgctatgatgcacgaaaccctctgaaaccatgagccaaatttattacaacaataaaaacaatcagacaaaataccacctaagctatgcagtgtggatggaggtaataaaaccattagtgtcagaagtgaaacaacttgactacaaatgtcaccacctttgaacggatcattgagaaatatcccggacgtgtgataaattaaaaggaatcaactaattccttaaaagatgcaatcagccatccccccccaggaagttataaatgacttgaatagctctattctacttgagaaatttaattcaaaaaatgagacctttccaaaccagaaagaattatgcccatatgactcacaggtaatctctcccacagactgaaggaaaactattaattctatataatttctttcaaacaagagaaggaaaggcacgcttcctaattcattccaggagactccattatacacaatcccccaactagggagaaatacaggttgaacatccctgacccaaaaatctcaaatattctgaaatcagtgacatgtccttcaaaacgtgtgagattgtggagcagtctggatttgggggttctggttaagaatgctttaaatccacataaatgttctataatcttataagctctaaagtctaaaaataaatacctagttgttcaaagtataaaggatattcagtctatattgaaaaagaaagctacaccagagatccctttctcaggaacacatgcaagtggctctacaagagcgtacactgtgactgacaggatatgcaagtttaacatttaaactcaacgtaaaaatctactgtatcgccgggcgttggtggcgcacgcctttaatcccagcactcgggaggcagaagctggaggatctctgtgagctattattatttttaataaacaagcagcatttgagagtaagagaaaatactatttgcactgatgttcctgaaagtgtaatatctaggagtaaatctagcaaaatgtgtacacagtcttacatgcagaaaattcaaaacacggagtattaaagatcaaaacaaatggagagaagagaactcaatgttcatagataagatctgacattaattaagggtcagctctccacttgtgatcccagcaaagaagagcaagcaaactcttgggtggttataaacaataaattctataattttatacagaaagaaaaaagactcaagggatccaagacaggagaacaaagttagaaaacagatgctatctaatgtcaagacagtgcatagctgaagtaatgaaggtagtgtggtaccggggaagtagagacaaattgattgatggagcccagcagaaaggtcagaaatgtgtcatatagatacaatctactgcaaagaagcaaatgcagtgcaatgcagaatcatcccaacaaagacactaggacaactgcacagctgacccacaacaccacacactgttcacttagacgaagcacacaagcacacacaacaaacagtgcacagacacatcacacagagatagacatgtactctagccacatatcatacacagagagagagagaacacacagacataccacacactacgtgcaatcatacaaacacacatcacatacataggcataatacacaaatacacacaacaaacaaaatacaaatatacctctaacacatgttatacataaacacatacatcacacacatagatatgacatacagaaacatagcaaaaaatatacagacacaccatacataaacatacccatattcgtgcaaccacacacacatcacatgaagacataacacacacaacatacccaactacacaagcacaaaaggaacaatacagacatactacagttatacataacacctacaccacacacaaacacacaaagacacacagagacatatatcacacacaaatacacacacactccagaggaacctagaaaaaagatccctcgcccttcacaaatgtaagtgagatggcttatagagtggagtgtaaaatacaaacctgtccccaaagataacatctcaacaaacataggtaactttgggtctcgtagtgattttctagatataaccaaggcacaattctggaaagaaataacaataaagtggttttggttaaaaaggaaaatatctgccctgtaaaagacactgtcgaatgaatgagaagatgtctccgacagagaaaatattgccaagacatgcctgacaaggactactgcctacaacacacagacaagtcttacatcacaacagtaagaaaacaatctagtttaaaaatggatcaaagacctgacagagattaatcaaagactgtgcacagatggcacataagaaagatgctctctacctgctatgaccagagaaatgtaaattgaaactgagctgctgctgccttggcccagtccagaacactgtcaccaacagctgggtagctgtgaggcagcaggaagcctcctccttggctgctagaaagacagtgtgcaaacaaacactgtacagtccagcaagagggttgctggctactcaccagggatgctgcaaacatgtaacccaggcatggtgacacttgccgaacatgacagagcatcttagcttgatttagcatatattcccatgtcatatcccatctctgatgcaagtcagggcaggaacccagagttagaaactgaagcagagaccatggaggagtgctgcttcccggcttggtcttcatggcatgctcagctatctttcttatgtggcctaggaccagctgtcccgggtggcactgcgaccatacaatgagatgggtgttttcacatcaatcaggaatatgtccccatagtcttacctacaggccaatctgatggaggcattatctcaaacaaggttccctcttcccagaggagtctggttcgtgtcaagttgacaaaaaaaaataaaataaaataaaaccaaaccaaacaaaaaacaaccagcacattaagtttgagccagcctgaactataagaaagaaagtaaaaatggaagagagggagggaaggaggaagggagggaggagagatatacatatagaaacctgcatgtggatatttgcagcagctttctttataacttccaaactttgaaggagccaacaaagatgtccttttgtaaggaaatagaaaaacaatgctacagacaatggaatattactcattgccaaaaaggaacaattgagctatggtcagacatggaggaaaccaaatgcatattactaaggaaaagaagctagcttgaaaaggctataacctgtcactcactggacattgagggaaggtcgtaagtgtggcaggaatacaaagtcagtcgaggagctctttgaagatcagagttgtctggcatgttcctgtatatactggctagaaccttaagctgtgcaccacccacgatgaacctgaatgcaaactgtgggtttgggcaataatgagatggaatgcaggctagtaatttggaagggatgtaccctctgggaggtgttgacaaggaggcaattcaggtgtgcaggcagcaggcacatctcagtgtctctgagccttcctttcaatttagcagccagcctaaaattttccattttttaaaatgtggccatggaagtgtatttcagagtcacaactctgcccacagacagaattttctattgtgatatcagagaacagctattcttgccaggttcatactgtgcgctaagcgttcttgccttgtaagactgaaaggcccacacaatgtgcccagccccttccattctccctccaaagtcagcacaggccctcagaggcgaaccccaaacagcttccgggaagaaaaaaagcatgcctgaaatttgaaaaggttgtttctctcccatatctacctcgggcctgttagaaaactatcagggtatcaactcagttagggtgctttcttccccagcatgtgaccagaggttaccaggattgccattggatgtacaaaggggcactatgcccctgcctccataatcctcgcaggcccctctgttcttagctgttcggggatacttccagcagttggtgatttaacagaacagcagcattaaccgaggaacgttggctcagtagttctgaactcagctagacttttaagcactagagtttccacatcttgatcattgctttaattcatgcctgactctcctagaatgctgagagggtgtggattcagtgacctgtatacccttggcataatgaagctggcaggatccaaagagttcacagcacacagaagaaaggagacaccatgtaaccagaggcaaggtttattcacaaactacccacctaggtgcatttgcccaacacatcacccaacacaacctactgcactcctcggccattcttagttctcagatgcctgggaattctatctaagtgaatggaaaggctaatataaatgctaccaaaggctcctgttttagatttattttccattttcctccagattagaaggcttgcatttgtcatcactcatacagtcaacaaatgcatcattttgttctcagttccaaagtgtaggccagttgctaggacagagtgccaggcagcataaacaagggttagcaagctgaaagcctggagaaggtagccctgactaatcaaactttgaaagagagactatttcttgtgtgaggaatcttttgaccaagggaaggcagggtgggggtatatttcttctgggatcacagcatggtagagtgtctcagatcctgttactgtctacaatagaaagaataagtccacggttggtggagatggactttcagatggggtagttcttagcctttggattgagacctaattttgaattgtgttgttatcctgtaacttgtaacatctgtctcttggtttaattgttgagttcacatgtttcacatagtagtgttggctgtagagtatataaatcatcagttctctggctcttatagtcggttccattcttcagtagaggaaaacaaactttttcctcattgacttcagtccccctggctatttttttattgtaaacacaaagagactttgttgaatgtctggtcatttctacccagtgttgccttgtcattaattgtgtgctcaggagatggatggactgtgtcactctcctaattcatgacacattgtcactagcctataaataattaacaaaaggggatttttccagagaagcaaactgccatgtccattagatttaagtcctctttcaaatcccttcatatagctttttattgaaatttttactatgtagagtcaacttttggtaaggcaataaaatgacactaattcagatagtaggcacttaggagtgagagggttagttagaataaacgaaaagtaatgattatgggagggagatttagccctgtgaagaactaccatgaatctaaagtctactgccaaaaccttttcggtaaagtttctctactaagaggctgtttggctaccaacagggactctctccagcctaagctgagggacatcagaggctcttggcggcctgcctgggacacttcagcatttactgatatgtacattctaagggcttcatgacagagacccacctgggtgctgcccctgtcatatgaagtctacattggacagatgtgtagaaagctaagagtccttgcataggaactttgctggcactggaagatgggagttagtgcatcaccagcctggtgggacaactcaggtcactttctctatcatctctacaggttcccagtgagatgattctccagcaactggcagccataacatcctatattacattagttttctttccttccttgattcaatttctaatgcttcttgggaccatcttctgaacccaattgaactgaaatcatcatctcgggtttatctctaggaaaactcactaagactatatgaaaagtaatgggagactccaagagatgaccttcctgaccacctaaattaaacacagctaagttgggagggggttcttgcatatgagaggcttcatagcctcaaattgcaaagctcagagagctaagactccaggtaaattaacagccattaaagccaccccaagcctgtggcatctgggtcctctgtcttgtgaacttggagaatggattttatagacaatggaagggtaagtttagaacccagagttattatagggaagtgggtgggagcgcaagagaaaaaagacagagctcctatatgacagaatcaggtccccagtaatggctcaccactgagctgcttgacctagggcctttgataggactcatggtagaaaatgggatgaggcatgaaggcaggggctaataagtcttgactaaatgcaagatgtccacatgcctctcagttcaagtgttgtctccacatagagcttccaggaagcagggtttatttaaggtgtgtaaagtataaaaaaaaaaaaaaaaaggaacaatgggccttttttgtcacttctgggtactgtccagaacaaatccaaggatgtttcagtccaaggacaagaatccagatccctgtctctaaactgcccaaccagcttcaatcctctgctctcatcctaaggaccagtatcaaatatatgtaggtagataacaaagttaagacatctgtggtaagatggaatgctaccttggtcatcagtgagaaaaggaaaaagtctcaacatgctgataggtccttggtgttttatctgtaagtactggaatgttgtctagatgactcttttaaacttgccaacccattcttgcaggcctgccctaacccctgagtatgaagttcttcctctgcctgagcatccccaggaccactgtctctgccagtcacttggccatgtgaggatggtccctgtgttctcggggcagtgcctgtcacactcataactaagtgttattttagatcacaattctgagttcgttgatttccccaagttacatgggaacgtggattagaagattatgaactcatgagtgtctccaaaatctcttttcccatcctttaaccttttattctcttttccctttttttctccccaagattgggtttctctgtgtaacaatcttcagtgtcttggaactcactttgtagaccaggctgacctcaaactcacagagatccgcctgctgctgcctacagagtgctggaattaaaagcatgaaccaccacttcctggctagaccttttcaagagcctctatctactcattctcttacctaacaatgtctgctttattgctttttcttgctgttctgccatttatccaaacacactaatatctaaacatgttcctcatgaatttagctacaaaggggaaagagagtcatctcatttaagcttgtatgttaatcaaattgactctcaagaaagatgctcaccatcccagtatgggttggcaggggtgatggtaagggcaggtccaagttgagagggatgggcttaatatttatataaaaatctatgtaacaaatattgaaatcatagtatttattaaccagaatgtctgttcctatgagtatatgataattctaaagtgattaaggttatttgcaaagtgttgactatttttttaatgtagccctggctctcctggaactagctctgtagaccaggctggccttgaactcacagagatccacctgcctctgcctcccaaatgctgggatataaggcgtgagccacccaatgccctgctgcaaagtgttgtctttaatagaagaaccttcttcagttgcttcattggtaaatatgtcctgaattgggccaaaaataatatcaagttagtaacatttaattttacttcctttaccatattacctataatgattttcaaacatctctctggtttggggacagttgtgtttcctattcatatttataccctacatgttgctgagagtgaaacctgagacacattaccaaaatccgtttatccaagcacagaatgattcatatgcgaggcttccacataagccacactgaagagaattccgtcaagccttactcaaatggcctacagagtgagttccaggacaggctccaaagctacacagagaaaccctgtctcgaaaaagtagataaaaggcctaaaaaaaaaaaaataagatatcactgtctagaaggcacaggttatcttattttatgtgcttgtatatctcaaggaggtaatttttaaacttgtagagaaaacacaacccaggagatactcagagaactctgcccaggacttttagaggccacaaatagaaaaagaagataggaatggcctgattggctgcaactgtattgtttcctaatttgggtatggtttgatgggttggtttcctataattggctaatgttcaattgtttgtgattagttgaaatcaagctgtttcacacacacacacacacacacacacacacacacacacacacacacacacacacacaccatactgttaagttttgatttgtttatttacttagttaggttgcagtttgttacatagaacttcaaatatacagacagcctcaggctggtggcctcctgcctattcaaacaaatgtgactctagcttgctgcttttcctgaaggtcaagagtagaaaacttaagtatgagaaactagtatgcacaaactgttctttccacatgtgtgcacactgtcttggaagatcattataaaacattttagtgaataggaaaaaaatattgcttgccatgatagctgacctcaaactcacagagatccgcctgctgctgcctacagagtgctgttcatcccagcactcaggaggcagaggcaggtagatctctgtgggtttgagatcagcctggcttacatagccaattctaggctaactagggctacatagtgacatagtgagaccttccctcaaaagaaaaaaaaagaagtatcgttcataaggtttaccacttatagattggggtgaggctataacaggagaaagctaacactcacagagtgccatccatatgccaggagcctcacttacttcattcacttgactcagcccagagttatgtgattccaaatgcatcacggtgctctcagtcctaaatgaaatgaaccccttgcccatctttggccagtgacctaatggaagaaggcaggaccatgggtgtgagtccatctttagccatggtgatacagatgtggtgactccttttctgtatattatttttcacctgtttgagtttatttctttttgagacagtatctcactgtgtaaactaggttaaccttgaactcacggaaatctgcctgcctctgcctcccaagagctgggattacaggtgtgagtcactaacaccagactaggcaagtactctattactgagatggaccactagaatgttttttgttttaagactaggcctcactaaattgcccaagccagcactgtacttggggcatcttcttgcctaagcttcttgagtagttgggatgataggcctcttttaccaggcctagcttctttcttttctatgtagatgaactcaccagtattcagcttcaatgtactcaaaactttcagcatcccgtctccccttactcacaacccccaatccatatccctggcttttcttgctgcagaggccttttggtggattgaatggtccccaaaggctccagtacttgaatggttagtcatcatcagggaatggcactacgtgagaagcattaggaagtgtggaatttgtggagcaggtgtggcctccttggatgaagtgtgtcactggggggtgggctttgaggtttcaaaagttaaagccaggcccagtgtcattttctcttcttgctgcctatggatcttagctacttcttcagcaccatatctgccgtggtgccaccatgtttcctgccatgatgataatgaactaaacctctgaaactctaaggaagccccaattaaatgctttcatttataagagttaccatagtcacggtgtctccacagcagtagaacactgattaagacaggccttacacttttagctggaatcactgagaatgctaaacctattgtaaaacaataacccattgtctgaggccgcatgaacaggagcttggtcccagggtttgctctggaccttatgcttccttttgtctttgacttcttgacattccagggaaccagaaagactatattttactatagcatctcactctttgggactccttcttttgttctcaaatttcagtgaaacaaggtgactattaattattaattattaattattaattataccagattaatttgggatttcttatacctgtaggcttgctgcttggaaaactgttttcagtcctggtcatgattctatctttgcccatgaatgtcactgtgtactatctactctcattgccaatataccattgataagtagagttgtgtaagggtgtttatgtgggaggatacctcctatccctcctacacactcctggcctatttcattccatttgttggtgcatggttaacatgcaaatatcctcattggtgctgagtaggtgtgaaacaaacaaggaagtatgcaaattatggccatgctcattaccaacagctttccctgaaattacattaaatgccatttcttagggtctaatgcatttgacaaaatttatcagcatgttctccttcccccaacccttgcctgttagggactaatgaaatgccatttatttaatgacacatgcatcccctctttccactgcatttgggaacttactcatgcaatcatcttcctttaattatctgactccaaagaatatttcaaagtctttccaagaccttctgaagttattatttcacttttgaataagatttactcttcccctctagacacataatctctaatcatttccctcagaatcaggttgacacttcatttgtctcctaagcaataagacacgactacctctgtgcataatgaagaactccaaagcctcaatttattgtgaagcacatagcaaaactaattgcatgaaccacagacgtctaatcagtataaaaattagaatatagacactcatttgaatgataataccagaaaagactcggagatcatttgttatcagttcagcttacagatgaggagagtcaggtctagaaaaactaagacacctctgaaggtcacggcccagcccctgacaaaaactgcctcccacattctgctcagggacttcacatatcactcatttttcttcagctgggttattttctcagacatttcccatttcacacaaggattgacacgatatcttttttaatgtacttgaaaagaatttttaatcacttggagagcactcatattttaaattttgttgtatgactagatcagatgccatccaggtctaccagaaaggattcatgttttctctgaattcttatgtggcatcttctcctgccaagataggtatgtcttcctatcttatactgcactcacctatgtccatagcgtcacttaggccaataaactcctgagggactagtgtgaggtccatgtcaatgtgaacatgggaatctcactgtttcttctcacccttcctgcacacactttaaaacttctcatatcagattctgacattctctcaaatagcattgtggggatacagctgtctattgatttaacaaataaaatgatagtcacagatgatctccaggaatgtgtatctggataatgccacggtatgtttcaagcccaagtgtaataaagcttgagtttcagcataagctagtggggtattttaaataattaaggagttaacatttatttctcttcctaaatggcagttttaagggaaatttaattaaaatttatattttttattattgttgcttctaaaattaggaataaaatcttagattccattgcagtcacctaggggggaggaaaggcaaagattggataatattatttatttcactctagctgtgttatgtctttgtccactcatttggccagaagataatactgtgggatgttatagctttgatggagaagctctgggtcactgtgggaacatacagagaaatatttaccctcctttacagggacaggataccaaaatcatgggagagagtggcatctctgctgaaggcagagggacaagtgaaagccaggctgcagtagtagcactgaaaagactattccagatgatagaagtgcatatgcagagcctagagcaagagagaacttgatgtagctaccaagagagttgcaggaggcccaggacatagaacggcagctgagtttcaatgagagctccatgttatagataaataagtagctctattagtctgaccaagagacagaaaacagaaagtttagtttctgctgtgtactcccaggcagatacagcctcagttttccaatagaagtgtcaagtctggatttttaggagaaatctccatttctaagtgcttgtaacaatgtgtaatgcaagaaaatattatgctggccgaatgtcactaaagactagtttgccatctctagtcaggagcagttgtcctcaagatgtggccaagaggccagctgaaggtcactgttgacatctcagagatgggaattcttaggcctggcccgatgccttaaacaacaaaaactctatgatggatggagcttggggatctgatttcacaagcccttcaggtaattctgatgcagccgatacttgcttcctggcagacatttctcactgattacttgaaacttgagtatgctcatgccattttgccagtggcatttggaaagggttttttttttttcatggtccaaccagactaagatgctaacaacagtttcacttgccttggatctttcttcagctttaaaccatgcttcacatcctctatttaacatccaaattcctcttccccaaccccaaaacctcccagcccccctctatacctatagcacttggctatcatcctgttcatacccaaatcttttgttaccagcaacaatagacacagactagaagcaaccagaatatccctatgtattgaacagatttggtaacttccaatgatggaatgaaatagtcaccaagtgggaagtatggtgtgctcttcattggctgatggtatttttctccagaatgtgtgtgctgctgtatatgtaataggcttgaagaaaaaatattggatggactctacagcaccatcattagtaaccaagatactatctgatcgccagttgagattatggcatcatagattgaagaacattagctcttttaaagatgtaagaaaatcctgagggtttagtatgtattgaatgcatttgaataaatatataagtgtggggtatcttgttattatcactttccttgccctgacccagtgtgcctctcactcttgaccacataactgtggacaccactgtccctattaagcatacattgtttgcacggcttgctcgctggtttggaaatcaacagaagggaaacaactttgaagtaaaaccaggctgaaattttcatccactgctgaacccaaaatagatactggttttaacccttcctctgccttatcaggcaaaccatgagcttagcaccaactggttgacaaggtatatggctagagtcttaacctgggtggctgccatatcagatcatccattggcaatgtttcttgatccaggataaggaaaagaatagtgccgtgtgcattaaaggaggtcttcataacttcagaggacacatgcatgagtgctgggacttggtctttgttcaacactgagcataggacatattgtaagaagccctcaatgtgtgctttaaaggaagaccttcaaaggagacacaaactgcaaaaacactttgaaaagtgggcagagcatttggaagcagtggaagctgattctaaggaatctctccttatcctcatggtttattaaggactttgactcctgtacatgttctcagaaaacgtggagagccaccagggctgattcaaatgccattgatgcaaagtgtcaggaaactggacaccctgagcatagtgagccttcgaggactatgtggtccctttctgacactgttttcaagtatcatgtcttatgacgtttattgtggatagacttttctagaagtggcatttatgtgcatagggaagccatgcttgaatctgtgtagtactgggtaccaccctgtcttggagttctatttcttcaattaaacacacacccccaaaaaccaaaacaaaccaacaaaaacatgcatttatttataagttaagaaatctctagaagtccttaaatgtgaataattattgtcataggctttcttctctaggaggacattcaactgcaaacactgcacattttaagcccactaaagggacaaatagtggtatttctatcaaaccacagcaaacaaagtttgaacctcatcacaaatgagctggtgtctccttgaaggatcagactccccaagagctgctacttcaagaaagtttcttgataagaacaagggaagagagaagcctgtgctgagttccaccagccccagggactcaagaaactacacagtccctgctattcccagccctgccttcctgggagacctaggttgcaaaggctgtggactattcactatgaaacactactcagcaataaaaaaaaaaaaagcacaaagtagtgcaacatgaacctcaaaaacattaatagaaaaaaaaaaaaaaaacacgagacttcacaatgtgtatcttctgcccaccagtttccaaataaccactcagaagcttaatattagttaaatgcttggctgatagctcaggcttgttgctagctaactcttaaattttaagttaacccatattccttattcacactctgccacgtggcggtacctttattagcaagacaccttcacctcctgctccctctgcatctggctggtgactcctgactccacccatctccttcccatcatccttagtttggttgcctcacctatacttcctgcctgactcctggccaattagtattttattaagccaattctagtgtagaagaggattattccacagcaaagctgtgattctctttgtatgtgaagccagaagaggcaaaactaggatgagaaaaagtaggtgagtagttgcctgaggctgatggtcagaggggggggctgatgacaaatggccctgagaaagcctctgtgggtgaggaaagtgctctgaagagcttctgttgttttgctttttgagacaggacttccaagtgggcctcaaactaagtagcagagacaggccttgaacaactgatcttcatgcctcccctgaaattacaggcatgtgtcctcatgtcctgctttaagaccctgattatagaggtgttcacactatggtatatgactccaaaacgttcctgttataatgagcaaatttgttgcctgttataaactagtaaatctgggaggaaggtacttaaacaacagtaggtggaaagaaaacaaattcgaatttacattacaatttccctttttctcagcaggtagtaaccctctttattctgacggcttttctctgatattaaatcagtgccggctgggaagtcatcctctcctcttgtgtatcttcatgtttagaacaagtttcttgtgcatggccttgtttcttggtccactctgatagtctctgccgtttcaaatggtatgtttagaccattgccattcaaagtgagggttgccatagttgaattaataattaattaatattcctattttatagccttttcttttctttattgtcttccacacttcctgcctctgatatgttaactgtttttcattccttagcataccacttacgctttgatcttagcatccagactgtccactccaaggtcttaagcatgttaaagcaagcattctgccactcaactatgtctatgtcccttatacttctgaaaacttttttagtagttaccccagagatgacaatacgtaactacagccttgtgggcaggtctactttgggacagtgccatacccttagagtaaggccttcccagcatgctccttccagatcttgtcacagtttatccgaattgcatttgtccacatgctgtgatcatcaggtatgttgatttttctcttttgcacagttgtcttggtaggttaattagggatatgagaagttaaatatttcatcccccttcacacctgcttctctgggttctttgaactttttttttgactggcatatgacaatcctgaatatttaaggtgtaaaatgtaatgttttcatatgcttctgccttgtaaacctaggaactaggatattatggccacatcttgggtttttatttttttattttattttttttgagataagaccattttgaaccatctgtttgagccatctactcttcactgttaaccacagctgccctgattatgtaacagaattgatagaacttagtactcatagtgaaattcaatcctcggccccttctctcccctcaacctcatagctccacccccaacccatctctcccctccccacacaccccaccccctccctctctaccctccgcttctggtaactactacttcactctcgattgttaccaaattctttagattccacatacaaaaatcacactcttcagcgaatgtaatgctcaccaagcttaacactgttatgctgtatggctttgtagtattcctagtgggtagatacagaatgggtggaccatgcaatatgttctttatctattcaccttgaacatacaggtagattaggtctggatgttcttaaccagtgtggatgtctcttctgcaaattggttttatttcttttggctacatacatacacacatgaaaaccatacatacatacatacatacatacatacatacatacatacagtaatgatttgaacttttggaagacccttacactgttttccataatggctgtactgactgggctcctggcaatattgtgtgtgtccctttctccatttctgaccaagcctgagcagtctttaaaacaactgtcctaactggtgagaggcagctcaccgaggttttatgtctttccctattacataagtgatgttagacacttcttcataggctgattggaagctttctcatcttctgagagatgtctgcataacagatggaggggggcatgcaagtgagtatatcatatattttggatcataatccctttcagacacgttttacaaacacaattctgtcctctaggctccctctgcagaaacctcccagtttgcaaggaacagtcccatttgtttcctttgcttttgttaccatagtgtgagcctcagacttgctttttgttcatttcaaggtcatgaactcttcgttgtcttccagtaagcagttcatagttccagcatttacaattaagttttaatccattttgaattgatctttgtatatgtgagagagaggcctattctgttcttttgcgtgtggacagcagcatttctttctttcttcattacacattttaaattagcttacaaataataggcttccatataggatttccatccatacttcttttggcctgactctccggtctctcccttctctgtctcatctttcccccagagatcctccttccattttgttctcctgtcttctcagccccacccccctagtctctttcttcgagtttcttgacctttaccccctcttctccttcttggatacacacatttaacagaggctgacatctgtgtatgagagagagcatccggtttgagcctgggttacctcactaaatgttttccagattcatgcattttcctgcaattgtcattgtttctctgtacagatgaataaaaccccattgtatatatttgccacatttcccttatctattcttcaactgatagatatgtaggttggcctcatttcttgccactgtgaaaaatccagtgaaaaaggtcataggatgcggcattcattctttgggtatatgcccaggagtgccaacagttgttattaaagagactttctcccactgcaagtttttggcacctttgtcacatatctgttgacactaagtatggagttgtttttttttttttttaaagactttcttttcagtgtgatagaacatgtgttgttttcatgccagtgctatactattttgtttattatagctttttagtgtattttgcagctaggaaattctgcctccaactttttttgttttgttattttttgtaacttcatatgaatcttaagatttatttatcaatgtactgtaaaaatgtattcggtggggactggatccaagatagctttgagaatctttcttcatacagctcagtctctgtcttttattttccttttccctgaaggaaaaaaaagatggtcccactcatgataagaaagaaaatcccttgcttcttatgagtaactacagaacctgagaaactattaatataattagtatactttattcttccctctctccctttttgagatggggtcctcactacatagcccaggctagcctggaactcacactccttctgtttaggcttccaaatgtttcctcacttttggggaacagttttcttaggtttagaatattatgttgctaggggctctgtttgggtgaagttgtcttacaatgcagccgcagcttgtggtggtgtgtcttctgcctctacctctccagtgccaagcctcacacactatatgactgtatactcaaacaagtaaaaacccatactttatcttgaagctgctctagcaaatttcaaagaaacagcttggttcttccctctaaggtatctgtgtagcaggactgactgttcatatgaaattctcttggggaaaagaggctatatccataagcagagactactggtacctttctgttaagcaaaccgaagatatttcccccagaatgaggctgaactcagacgcaaatgaagactgttgcctgtcactcacacaacgggaaagctaggtgagacagcagatccttccgccttttcctttgttctcatgcacactgactctctctaccctgatagcgtgctgggtattcacaccggaaacagcaacagcaatcaagacgaatgcggctgcacactgctccccgggaatgaattaacagaaatttgcctgcaatctgatagatttagatttgtggtttcacacgccagcaaatgtgtgttggattccagggtgcaccaggagtttctgcttgagtgggtctcggatgagcctgaatccatgtccccaggtgatgctgattatgcgggtcgagagaactgcactctgtgaaacattaatcctgaaaccatcaatacttgatgagccttcacaagagaggttctcaagctgtgggttgcaacccctttgggggtcctgtatcagatatcctacatgtcagatatttacattatgaatcataaccagtagcaaaattacagttacgaagtagcaatgaaaacattttatggctgggggtcaccacaacatgaggaactgtattaaagcgtcacagcattaggaagtttgagaaccactgatttacaaagtacctcttagctctgttaatctctctggtattctttaatgacatttataagttttttttttccctaaatagtggaaacctttaataacaacgctgtatgtgaactataaggctagacttagagacaattcactccacattttgcggaggatactgaaactcaagtatgtctggggcaaagccaggaacaacccacacatttgattctaagtcagggttatgatctcggtttcataactaaaaaagaaaagtaaagaagagaaaaagcagtttgcaaataggaggtcttaaaaatgttcttagccatgcctgctgcaatgcagccacacacagtgtagtcattttttcccacattcaacagtggtctcatagaagcacctcacaatgttgtttccacttattctcataaacatgatctgtaatactcacatagcaagaacatcacatgacactgtttccctcaaagccctgggctgttgaaggatatgtggctgtaggtggcacacatcagtccaccagaatatcccattccaaagggcatcctatgaaaatcacctcatttgggaccacgcacagccccatgctctgaactcaaatcttcccttaactcaggttgagacagccaagtcgtgtgccaagccaggagcacagaggagactgaaaccaactctgagggacttgtggcaaggctctcaggatctccctggaagggtggctcctgtgtttatagggggtaggcgggaaatgcttaggaatgttttctacacaatgtgcacctggagaacttgactgaagctatgtggtagccatcctttcccatagggacacatcctaagaccccctgaaactactgtcagttctgatctcaatataaagggtccactttaatgtaggcaacagtgggtaaattgggaagtttctcaggtcattggcagtaggtctatccctagtccctagtgcatggactggccttttggagcccatttcctatggagagagataccttgctcagcctagacacagtggggagggccttggtcaggcctcattgtggtgatgcctcaggctttgacagacttcattgactacctatgggaggccataccctctctgaggagtggatggggatggggtgaggggaaggtagagggagagggatgaggggagggagaactgggattgatatcaaaaattaaaaaataaaataaaggaaaaaatttagaaagaaaaaaaggggtccactttacaaatgcatctaaagtccaacttataaagtagtaggaggcaggcttagcaattactagtagaacatagtacagttaggacattattttgatgtagtttggatcttgactattctcaaaagctcctggcttaaagctttgcatttccccaggagatgcttttaggaggaagccacagcttgagcatctggggcctagcatgaggtcttgaggtcactggtgacatgattataaaggagacggtaagacctcggttccactctcttgctctcagaggcattggctttactgtgaatatgcagccttggccacagcaatacggtgaactgactgtagagactggaagctcaggaagtgtgagctggcatccctttctcattgtgagttcagtatgtcaagcatttgctgcagcaatggaaaggtaactcaaaaaattatattaatgcggggttcctcttaaacataccatattataatcacccttttagtgtaaccatgagataatgcagtgcctacaaaagaagctaaagtggtgaatgatggagttagggtactgttgatctgttgttagctgaataagcacagcagcaccacatggacacactggacaaagggatgctccatgatgactggcgggtgggtagtaaatacagcatggacacactggacaaagggacgcttcatgtactgggcagggtgagcatgatggttcagggagaacagttcagcaaatgcagcagcagtggggatggagtacatccttcacacagagaaggtttgaaccccaaaacacaatgttttggagagctttaccagctctgaagccaagaaaagcacagaaaatacagacatgagagcagagggggagaggcactgttttctctgcactgatactaaatcgtctcagaaaggaaacttaatatggtttcttctttgaaggctccgtaaatcctacaagcaaaccaagaaaagaaatacaatcttctggaatgctcagggtaaccgaaaaatccaacaagagctgacaagaagatgaggtttcttaagaccatgctctgatacagcactggacatctcaccaagcataacctcagggaccctcaactgctccttagaaaaaatgtccacccacttgttagcggtacaggaaacttccatttgtccctgccagcagttcccagggaaaggacttgccaatctctgggatggttttttgaggactttagaaagacatcaagacaaatgattgaaaaaacaaatttatgacaactgggaaataagatggctactagtccattaactattgggaaacagacattaatcccttctgctgtgacatcgaactgtgatctcctgttctcagatttgtgctatgtgtgtgacactgttacttacatcctcacagcttattaaaaaagagggtgcagagcgcaaaatattgctaaatctcagtgggaacggtatacagaatatgggtattcactgagccggtctccacataaaaatgctacctttatagattttctgactaatgaatgaaatttacaccatgagacaaagctgacaaagacagtgcggcttgactggcagcagcccctcttttagttaggagggcaatggtctccttggcctttaacagcatatctaggtcatttctagagacatcccctctggccatgtgatctgtgtaacaataacctcctcctctctctgcaggaagctgccatgtcaagcccaaaggtttcagtgcccagggactcataaaagaaaaagcgacagtgtcaaggtaagttatcggtttattaggaaagtaccaacaccacatccttcgaaattactggaattttatttgcctcaggcttatgacttgcaaccaaagacattgtgcaaagaaagcaaagattaagtacactttagggagaaggagaccatacccattggtaacacaggagctcaggtggacaaaagaagccatcgggacactctagacactgtaatagtcaatagcgtcaataaaacaagagccaaagggaaaaaaaaattccgcaatgtttacagtagacataaatcttatacaagtcaaaaagctttttttttgtttgttcttcagatcatagagcataaaatggaaaaatgtatatgtaggtgatttctaactactgtacatctgtcacctagtaaagttgcttatatgtaccacagtgtaaaaaacaaacaaacaagaaaacaataccgaacaaatgaaaattttgaaaattgcctgatgaaaaataaaataaccagtggcttttaatggcttctcccggtcatcagcgctgtagaagataaaaatctcctcatcaggatagatgatggaagcaagcacatcaaacggctaccaaatttgacccacctgtagaaatatactatccacccacgtcttttccatcaaaagcttttgtttgtttttaatctttgaatctttgaggcccatttggtcacaatatgttacaaatattcgtgtgtgtgtgtgtgtgtgtgtgtgtgtgtgtgtgtgtagatgcatgttttgttttttttacaccatgatatcatatgtttgtctggcactatcctaaagctagctctagatgacaatgaggacggaggaataacccagtgcccaaagggcaaatgaactcactgggggtgaagggagaaagggggagaaagtgttcagttctgccacagtcagatcaagtccacactgctcactcatcatcagtcccacttgcctctgactgttcctaaaagaaaaacaggaaagagtgaatgcacccacatctcctgcagtgggaagacgagacacttctttgaagcctgggcactctatgccgagaaggggagtgctggactaacaatccctaggcgaagcctgccagccgcgcttgccgtctgccacttgggttgctgaggtttacagctaaccatttctatttttatcggagctttggaaaaaaaactgtcccataccaagaaaaacatcatgcattgaatgtctgctcattggtaagccacctcaagaaaaggtggtgttttaaatgtcaccagaatatagtaattctgattctagaactttccagtcaggccagagtagcaaagtgttgaaggaaaaaaaaatcaaattcaggtatctactaaaatggagaagtgtctttcctgaatgagaactgtgtaggcgctgggtggcagggaagcagagagttaatgcaggggactggccaagtttctgtctgttgttctcgcagaccaacagggacaacagtgctagactgagtgctacatttaagaagctcctcgactctgaattcagccactgccattcactccctagggatccgcagagtaccggggacccaagtcccatcataatacaatcattaattattcttcagatgggaaggtgcctggtttgaggaaatgctccttaaaatttttatgattaaaaaaaaaaaagccttcaggtatttaatctcagggcagcacagccaaaaactctgacatcacaaagccttttcccttcaccccccccccaaccattatttcatctgatcagctatatactcacagcaagctgggtgagagagatatgaaatattaaccagccatgaagaaaactgtatttgcatgtacgtgcatgagaagattgaaaagggggaatggaaaccaatggaggagcttttccctgcagtgacacacacagctttagactctttgttctaaatttcacagctctgttcccatcctcagtgtgaccagctcctctgagtctaagcgcggaggagtgtgtaccccaagacagtttgggagctggagaccaggcatgcacactcacgttctcatcctgttcctcgtcactgtcaaaatcgctcacaacaggtttggctttgcctcggtttggccttttcttgcctttccctgtgtcccggcctttctcttcttttttattgagtttgattttcaccttcacagatttggctagagtagaaacaaaagagaccacggtgagagtttaaaatcagtaaagctattatcccacccgcagataacaaggtagacttcccaagagcctcactggcatgccagtccaccctgtctagttattccctgttcctagtgcaagcatggttctctttggaatataagtgatgtagtcactgggagaaagacctcagagcagggtttggaacctttccctggttcttgatggctcaacggggtagtgaccaaattaaaaaaaaaaaaaacacattaactattaacaaatcttacaaaggttaaaaaaggatgattccactgtgtaaattgctctatttagcttaaaaattctagtagtttgagtagcatttttaatgtagaaagagaacaaaatggaaataaaaaatgtcaacatgcttcctttacctagctttgtggctctctagcgattatctccagaaaaaaaaaaaaaagcatacttaataaccataaataaattctgtaggctatcataccaagaatccaagtaagtataggtgtgtgtgtgcacacacacagagacacatttgaagttttattttgttattacatggctcttcaggcacacccattgtccatgccttgctctttctttacttacacacaggagttagcaatatgtgttagctcacacatatagcttaattcttttcaacatcggaaatattcccatgcatgatttattctatgactgatttaaccagtcccccagtgatgggcactgcaacaagcaaagccactgtcaagccatgttggtagcagccacacagcacattctaaggctgccaaatgcactttcaagaagacttcagccagatcggaggtttacaggctacagtgctaaggagtgacaggtggcatgcacaccagggttatgccaacatccaaaggcaacgagggcagagtattctcaatgaacctaggcagtcctgagctctgtggctgatgtgctcaatttcaacagcggagaaaactgggcatgagcggggcaagtgttcatgcctttagtacctgtggaaatagcccgataggtggaaggggccagatgcagggtcttaccctctgactcagactcctcttcatcatcttcctcctcctcttcattgctttcttcctcactctcctcttctttggcgattttctgccgagcactcttaaatactgactgtaggacaatggagtcttcatagatctaaacggtcaaagtgtcaactgttaactataccccaaggcccgcagacccgcaattgttgtatgcacctccttagacaacacacacataccacacacatgtacccatgatgttactattgctttctccccctatgtatacagtgtgtttgttcctatgtgggtggccatgcatgtggacgtcaggaatcttcctcagtcactctttagattagtcatggaggcaggatatctatctgctagaattacaggctagcccctaaacctacccacattctggaaatctaaactggtcctcatacttaggcggcaaatgctttaaacattgagcacacgctccccctctccctacccccccccaccccggcataaaacagaaaatctaaatacaggcacaaagatactccaaggaagaccaaacacactgagccaaactcaaaagaatgtgttgggacctatgggtgcagaaggcagtatctttgacaacaaaatcaatattttaaatcacgcttatttaagcggttctcttaaatactgtggcaaaggaaccctttacagggttgttccctgttgccgagcttcattgcagccaaaagtcacctaatacactgtgcaccctcccctgctgagaggaaacaccactgaaagaaacaggaagtctacctaaacatagtcctttccctcaaaaaattaagataaaaccaccatcgcttctggatatatatacccaaaataagtagaaacagagtcttgaggaaataaatctcctccacatgcccatgttccggagaggcaccgtagccaagaattcagagggaactcaaagatctgtagacagatcagtgactaaagaaaacatggcagatgcagtgactaggactcagcttttgggaggaagtacctcctgttactttctacaacacaaaggaaccctaggaagccagtcaccaaaagatggacaccaagcaatcccactcatgtcaaactcacacaaagtaggtggttataggaaccggggtaggggagaactgctaaaggcttaggccttcgtcatttctaagagatgaaatactaccagagacctgttaagcacccatgagagcagccttaccactactgaactccacccttaaaaaacagttaaggtgccagggagtggtggcgcaagcctttaatcccagcactcgggaggcagaggcaggcagatctctgttaatttgaggccagcttggtctccagatggagttccaggacaggctccaaagctacacagagaaaccctgtctcaaaaaagagaaaaaaaaaatgttaaggtggtaaagtttatgttgtcttctgaccaccattcaagggcgatgaataaataaatgggcctttgccctctgggattaaattcttttgccatggagatgacccacatcgtcaaggaagtggcaggtcagcctgagggaaatggtgatgacaagcagggaacaagaaggataacactgtggaatgggggaaaaaaatctgccagagatctgagctgacaagttagggtgaggacaagctggctgcggggagacaagcatgcacaggagaaaggtgagaggccaaggtggagagatgggtggagacatcactgtcaatccccagctgtgaaagtggactctgctagacaacatgctacatgcaggatctctgtgtaacttgacctgtcctgctccttctcttttactggatatgggagcatcaggccagaaagatagatagggaaaaaaaaaatcagttcccaccaaaggtaagtagaattgagttgtaattaaagtggaaatgtcctcctccttatgctcataaattcactgttatgtacaatgacttcctgactgtggagaagggaatgtcaagaattttttttaaagtaacaattagaggcaccccctattctgttttaaatcattgtactttgaactcttcgtgtaaagttaaagttagaaaaatgaagctgtcactgcatacagtctctgtaagtacacagatggtacccagccttctagcattaccttcaatggctttcttgaactcttcctctaatgggaagatgagccttgaaggaagtgtgagaagaagcccacccagatatcgcacaaaaaaacctccctttattcacactgacagtagagaacaaggcctttcggttttcagtgctctgctggggtggaggcaatggttccaaaagtagaaacgaaacggaaatgctccacttccgagaacctcagcatgggtcaggttagacacttctcagacaacttgacacatacctgggatccctccaagttgaatgtctgtgcattgtgacagagaagcatgacatctttctccaggtcacccaggctccggtacttgtgattacgaattctttcctgatgggaattttgaacaaaacagaagagaaatatgtaactgtccttattgttgaagaaggccccgatgtccctttgtcttcacagcactcagccttgctgagtgcgtgggactgcgagaccctcccaccagtgttccgagggctggggaggaaggtgcacacaagggagaggcgggttctcaacaacatgcaatgtatataatctgagctttcggtgatcaaataacatgcatggaaaggatcaaggtcagcccatccccacctttcctggggcaagcacttgtgtaggtcagtggttagcaaccaggaggccacgaccccagccccagctagcgtcactcccgagcatccatgcatctcctttgtttactcgaagaataacagtgaacacagtatctacctttatctttttgaaatccactggcttcctaattaattcatagtattctggtaactctttcctggaaggtaactgaatgaagacttcactgagctgtcgccctgaactgcaggatgggggagacaaacagaaacaaagcagataaagcactcctcagggaaagggtcgtttcagagactgtcaacaaagcaaaggaggtcccacggatacaggcatgggggctctgcacatggaggaaacgcccaccactgcattggaggctgatgcccattgggagggcttcaaatcacatgaacgctcagttaggtccccatttctgtcacaggcacacgatgtggcaaggactctgtggactcccctgtcaggaggtaatctcttttcatcatgacagaaatatttaaaataacttattgagccccaagtcccattttaaatgaataacagagttggttaaaagaaagcacacagacatgactcccacgttcctttgtcttcaaactcactgtgtatttagaaaatatgttaaaatatacagagcaatgcaaatgtgaagctgttgtatgctctctccagcccttcctgtctcattccttttacagtgttctacaagtcatgagtcccttctattatcccttgcccgaggagccccttcacgtcccctaaatgcacttatgtgtgtggagcaatttggcaattcaggcgagagagagagagagagagagagagagagagagagagagagagagagagagagacaattgctaatgcgtgcacgctgcatgtttatagagtctgtgctgtaccctccccccaaagaatggtgggtttattgaaagcaggtttaggagagaaatgctttagcgttctgtcactcggaagagcaggctgcagagcaacacggttttcacatcacttaaggctgggagcaggcacagttaaagccacaaagaaggataattgaggttcaagaccccagtgcctgatttggcctctctaaatcaataacagcttatgatagatggtctagtcattttccacaaaaaatctcgctgcccttttgatggcatctctggttcctttgtgacgccagaaacatcaaaagataatcataaacccctggcatgtaaattttggaaggtgactgcaccagtgttcgggaacgctcagaggcagtggcaaggcatgagtgacaatatgctgttttaatccacagtcccagttgtataattaaaaaataatcataatgacagttatcataaaagaggcatgcgcagtaactcaagcggttgcctagcaaccagtgggggaaaagctgaagtgcaaaggggcctgcataaattaaccgccgatagtcaaaggatgggcaagtttttcggccatagagggtcactgttttgttttatttttaatgcatggaggggcctcatgaatacaacattggggacaaacacaagaggtttaaaaacaagactactgaaggctaggaaattagattcttggattactgcggtgagaaccaaggtgttctctacccttccattcccagcaggctatagcacagtttcttatgtacaatcaattccaacataggtccatattttcctgctattttggaatgtataaactcataactcacatttaacctgttttaaaaagaatatctgaatggcaccaaaaaaagccccgccccaccccacccgatcccccccaccccaccccatctctctgtctctctctctaattctgagtgttttctttaaaattaacattcttcaaaatctggcatcagtccacacaccagaccttcctgtagtcctggctttaatacctgaccctcagtgacatcttcaatgtcattttctacatctccaacagatggtatcatttttctattgacaaattacaagcacatctttgctctgcacgctggtgatggacagactcctgatttcacctgtgcgcctgggaagtaagaattaaacaccatggactagaccccagaatacactataactctgagagcacaaagccacaaaggtcacctgtgcctgcctcctctgtcctgtcaaacctgcaggccctaggtccactagggagacaagtccagagtcagccatgctcataagagaactgaatgtctccagagttggtgtcggaactataaaatgagaataaatttatctttttttttttttttacttaaaaagtaaagcccctttggagtagactccccttcctgctttttctgtccccctgccccaaagagagaatgaagcacaaggatgaaggggaagccatccaaggaagttgtcttccagccaccgagaggcttctaccttcctatacacacctttgtctggtgaccaagccctccagggtgtggccaaatgccccagttgttttactaacagcttctctgtccagcagaacagtctctttctctttgggaaaatccctgtgtgtgtgtgtgtgtgtgtgtgtgtgtgtgtgtgtgagagagagagagagagagagagagagagagagagagagagagagagagagagaggagagagagagagagagagagagagagagagagagagagagagagagagagagagagaagagagagagagagagaagagagagagagagagagagactggtttcttgtatctggtgctagaggcggtgagatagaatccactccaaagcccgaggacacccaaacccatggcagtccttctgcctaggattacaggtattgctagttctggttgaaatccatcccccttcaaacagtttataaccctcccacaatcaagacccattctccatgaaagtggagtcctgtcacctgaatattacttgtgtttaactttccgaaccacccttctcagaatcctctctccttcccacaggattccagcatgctctattgttcaatcttgccctgtcttcccttccagggcaatggcttggtggcagcccaggaacgtgagatctaggcttgggcagctggggttttcatgtgacctggagaatgtttaacacttgaagacctataaaatgcactgggataacagaacagttttggaaggactgcaacagttaacggacccctaccccccaaaaaaagtataggtttaaacaaacaaaaaataaagtcacctgaaaaatgaactaattatagaatggtttggagaaggtggcctgtttctgttgaagcctttatcctaccctaggtagttttcattatgttaatttatgcaaattaatgcctaagtatacattattgagtacactacttcctgtggcaaaagtgacactccttccctgagtccacagacagctttttgcacccattctgcacatcgatctacctcacactaagatgtatgactcaacaaggatacagggctggagctggaagagaaagatccccctgaactcggggcttacaggagctggtggcaagcactttactgtctacccaggtaaatggacacggggatatgctggctatgtcatatgtatggacagaagcaccgtgctccacccagaaacgggacttggaaaccctgcatgcaaggtgcacatgggcacattgctgagatttagtttgttatgtgtcatcgggaaatttacctgttaggtaccacaggacatatgctttagaccaacttgcttagaaataccttccttttaaaagaatggctggctgtcatgtcttccaatgattcctttgaagtccaaagcattaagtctgacactggataaagctgggcattttcccctgtttttatgaccctcctccaccccttttcttgagacagcctcatatgtagacaaaactggcccagtttattatggagctgaggttaaccttgaacttctgatcctctgaagagcaaggattaaacctatatctggttggttctcggggtgctggggatcaaatctggggctatgagcatgcaaggcaaataccctaccagctgagctacatccctagcctgtatttccatctgacaaagctgatcagttgacttaaatagtagtggaaaagagagaaccacctgaagccaaaataagtcttgtttactttaagcaacaaaagaaaaactatggcttacttcataagaaaaatgaagtcctgttggcattggtggcgcacgcctttaatcccagcactcaggaggcagaggcaggcggatctctgtgagtttgaggccagcctggtctccagagagagtgccaggataggctccaaagctacacagaaaaatcctgtctcaaaaaacaacaacaacaacaacaacaacaaaaaaaacaaaaaaagaaagaaaagaaaagaaagaaagaaagaaagaaagaaagaaagaaagaaagaagaaaaatgaagttatgatttaggacacccacttggggttggagggatggcatagggaaattattgcagttctgagggtatcctacataggaagtaatttgggaagaaagcctagaaactagaatgacagacctatcatggcaggaggtgagaaatgttgctttctccccagcttcctgggggagcttcatatacactactgataaacttctcaagatcacagctgttcccggattgaagggaccccagaatttgggccaggtattaatcaggagccatgagcataccacagtcactagtgagctctcttgtctgggcctcttactgagccgtgactggtgccatacaatcagtatgagatgttcttttgtttctagtagctgggtagggagctgttaaaactaccctacatatcaagggagaatacagatatctataccaccttcctcacaaatgaggctgctgtgtgaggaagccaggcccttgctcagcatcaccacctgacttcatccagtccaggaacagtggcactctgatgctgttctagttattattgcctccatggggccaagatggctcggcagtacccacacataccaccaagccaaatgatgttagttccacatccagatccaaatagtagaaggagagagccaattcccataagttgtcctgtgacttccacattcgtgccacagcatgtacacacaaaatatatgtaaatgaacatgaacataggtaaatgtaaaacagattaagatgttcaagatggtcatggtaggataacttaaaataatttaagtcaaacagcccaggatgtttaatcatcaccgaaaggtcagtgatgggatgctaaggaatctaaggctgtgtggtttaaaagaaccagggaagggttttggttatggaattaaaaacaaaacaaaacaaaaaaacacccagaggctataaacttctcagtgtagtctgtcctataagttttgaaataagcctagaagaaagagctcggagaagatatgggacaattttgcactcagagaaacatattctgcaacaggatttataatccaatgcaactctgaagcaggacacccacaaagtgggtctcaatgctttgctggcgctaccttgtccaaaagtgtgctggagatcaagaatcacattttattttccctaacaaagtgacactgtcacatgggcagctttgatttctatgaaatgaacagcatactgactcctttaaatttgaccaataaaaaatatgaataaacagaataattacatgacaactttacctgagatactgcaaccataagaatggattgcacttaagtatctaccactaccaaggacacttggaaaaggacatacagttgcaaatattttctttattttatatttttgatggccttcaactctcaatcctcctgcatcagcctcctgggtaccagaattacaggcatggaccaccatgtccagcttttgtattttcttgacaggcatcttgagacatttctactagatttaccacctatcacttgacttttagaaatactgacagaggccatctagttccctacacatttttttctcacttgacatttcataataacaagaaaaggtatgaattctcacctccctctgtctggcctgacagctaagtggcctgccacctccctggcctgtcatatccctagcctgccagttcctgttgctttcaccatttcctcctggaaatctgagatgccatcctttcaaaatacaaggatgactgactctctgccttctcagtattctgccctttgatcctgtataatgtctttacttttgtatggtaaacatgctttaaaacttttggttgatttgtgacacaaaccttctagaaacaaacaaaatctaatgtttgtctacctgagaagcccaaggctcagatactacttggtttaaatgggtggatagtagcacgagtctgagggccattttggtaaactctggaatgagacacatccgtccaatgaacacattcatgtacataaaatccattcaatatctgctatcttcaatatcaatccattttctaatgaaaatgttcacggaattgagtttgaagacagtgtcatttctgtaaaaggacacattgtgctatttccaatgggggttccttcctcttcctgaggggtcattcatgtcggtgttggcctggagccttctaggaagaaaaggccggtagggccagagtaatgatggaagctggggggggcctctgtcttcaatttgctttctgttgctgtgctagaacaccatggccaaaagcaagttgggaagcaaagggtttatttcatcttacacacacctctcaggttgcatttcatcactgagggcagttactgaaacagaggtcatggggaaatacttcttactagcttattcagcctgatccccccatctctccctgttttttttttttttttttttttttttttattgagacagggtttctctgtgtcctggctgtcctagaactcactctatagtccaggctggcctcaaactcagagatctgcctgtctctggctcctgagagctgggattagaggagtatgccaccattgtccagataatcctgctttcttatacactccaggactacctgcccaggggtggcacaagccccagcaagctggacactcccatgttaatcatcaatcaagaaaatgtctcacaggcttacctatatgccaattttgttttgttttgttgagactggatttctctgtgtagttttgcagcctctcctggcacttgatctgtagaccaggctggcctcgaactcacagagatccgcctccgtgtcccaatcaaaggcatgtgctaccacagcccgcttgaaagcctattttatggaggcattttctcaatcaaggtaccctcttttcagacgaccctagcttgtaccatgtttacaaataacaaaacaaagcacaaccaggaaacttctatacctccatagaaagcaaatagagcaaatgagctgtcttctgtatgtgggtataactaggtgagcactgttaggtatcacatcaccaggagtcacagcagcgtgcgccagcaacacttgcgtcagcggtatttgtgatgagggtgaagagagacaccagaacccacatttatctgcacaccttctaaatgaagtatcagagctctaactcagtattgctcagagtgtgctggagcacaccaacttatagggccattaacagtgattcctagaaggagagttcactgaacacatgagtctgggaaacactgggctaaagagaattagactgttgacttcacaggtcacagcgatacctcccaccccagttctgtagctggactgggtatctctaagagagctgggagatgagagttggaagtcctgctctaggagacattttcacagactaaacatcaagctatgacctcactagccagtccctgagacaactggcagcactgtgtgggggccaaaggagctggcagggaatgaggaacttctcagcacctagaacttgaattttgcctaaatgcatccacctagtcatggtgctatttcatggtaattcttctggaatctgactggagcctctaaaagcaaggatgtctgggcacggcagccattctagcagccttcctcctcctccatttaaagaaatgcagaacgcctaatgccaaggctgctaaaaataggttttgtctaaaagaatttgttggctggttctgaaagagcagtcaatactaatgttataatcatgacattaagggctgttaacagccatggagaggacttaagtgtcctgttgtggagtctgtgggtctgggttgctacacacacacacacacacacacacacacacacacgtatgcagaagtgtgtatacatactgccacatgtataccccactttcctttcacctacattcctagaatcttcattcaccatgcaggaagcagaaccaagcgctccgaggatcccacctcagagcacgtctgctgaagtctatcaggcattctgagagtgtattctgccatcgtcctccccagtaccacgccttatcagaatggtgttcccccttcacctagcaacacccctgtaactcattctaacttgacaccccctccaacatgcctcattcactccacatctcagcatgatatcagactgctggccctagcccagcatgaacatgcaacgtggcctatgatcctctcttgactctcctttgtgttacagcatagccaggtccctctgtggacagcacccatccctccacccacagcacacactgaccactgcaccctctttagcaggagcccagctggccccatctgggtcctcaacatgggacacccgacaatcaactgcaatgatacagacgctgccttggagctcttcaggaccacactcaagtccttcactttggagttcacacatagccttccgggtctgttctgctgcttcctacagggaagtctagctgcacagggacacatggtctctagaagcagtctgcttacccacacctccttcccacagctgctcatgcccacactactgagtactttggtttgtacactgtaacccctcaggctcattccaacccaatcccagtgccacacacaagccaagtggaggtattcctagtctcactgtccctcccctcgtcacactaggagtctgtacgacttgttggcatacctgcttctaacagtgctgtaaggcaatctagtttactcccccccacacttgcccattttcaatacttacacaaagactaacacggaaaaccttgggcttttgaacggaaaggatttttgagcaactgctctaaagaagggttagtttatcacagcacaactccaaatgccacacaattagctcaggcttaggggacaaggacgcacaggggacagtatgggaggacaccaactccaaagattcccccaacggaagcaagccagccaagcctcttctaacctctggaaacggccatttcaatgtgtagttactgaaaatagatttatctaggttcccactgcataaggttatattctctaccctcagaaagcccaggcatgacatcaggggtttgcagtagcctttaaagtcattaatccactttttcatggtcatgtgactgctttgatgaaggagaggggtaggagcaaagggaaaaggaactcagacagttaacccccactttgccctttctaggtacactcaagtaaccttattatgaaaacagcccactcttagggacacagtgtgggttcaaggcctcctgagtccttcttttctcctgatgctagaaacagagcataactggcggtgctcgccaggcactgtggcatgtgtgctttctaggattggacactgcttgctgagaaccaacaatttggccccaggttcgtctctacagacacgtgtttaagtccttattttaaaaggccacagatcaggatctgttcattctgaaatacagcaaaagcactacagcaataatctgaacaagtcagcttgactggaaggaaggaacatatcacactaaatgtactgataactcttaactgtgcatcacacccatccatctcccatcaaccagcaccatcatacgctagcgtctttagggaaagagcacttcctatttccagccagctgaagcagaggcacatgaagttagagagactggccgaggaagcttaggactcaccatgaggggaggctcaaaggtcacactctgaaatccagcccagcacacactcaggagtaaatgcaagaagcacctgcccctccaacccccatgcccactgcaatcaagtccaggatgcagagcggtatgaacatgcactcaacttcatgccacacacatcaggtctcctcgagtgcttggagtgcttggcgttaagctgccacacctaggcagcacagagttacatggtgcatcggacacacaccaggatgaggggccgaaggggggcagaggaggcagagacctacctctgaggtgctgcaggctgggcaggcttccagatgattcctgccacctttgtaagacatgcatgtgcaggtgggctcttgcagggtgagcacaccgcactgcaacctcaaaagcatggcaggtgtttaagagtatgtgtgcctgcatcctagatcaatttgtttccaaagaccaagtctacgcatccacttgctttgtgtaccaaaggatacctgtgtttagagacatggggatacaaggcaggtcctgacctgtttccttctatttccaactgagaattacagggcaccttctccacgttacacctgtggcagagtaaaaagaacactagagtcagaagacctgggtcctcctcccagcccagctccttcctctcgggctgggcgacctggagcaattgatttcactgggagtcagcctggttgagtagaccacacaaggtatcatgctccaatgacacacatttctccaatgtgatgggggttggagcatagcttcctaacattttagggccctttctgcgtctccctgctcccctgttccatttccatccacacacggtgtcccgttcgtagttccaaaagcagtggagaatgagaagccatgctccgggtgtgttagtcttgtttggcctcacatttgtacaatagggatcatacttaccaagacagcgcctgactatgaactggataaggtggttttggtcacagcacccaccacatgaatggattccacgcagcagcctgtattctggtcacaacctaggcgcttgtttcccgatctcttgttttcaacagatcactgaacaagtgctcttgacagccaatgaagttgggccactatctgagggttatctgagaattttggacactgacacataggcgaccttctgtgtggtggcgaaggaggaagggtaaacaggtgggtaacaccgggggaagccctccatcccatcagattagtctctagatcaaaccagccgcctcctgtggcaaacccacgctatcccactgcagcatggacactgactgcttgcttcacccagagtaggaggtaactggacagggtcagcatataccacacagtggggtatgaaagtgcatgcagaactccaaatacacatcattaactagaatgactaaagtccaagtgagaacagaaagggccacgctagaaaacaaaacagaaaggttgctaggttcagaacatggaaacctactttcccaaggccagaagtctggaagctcttagagaacaggaagatgtgattagctatatgcctcaggaagaaggcaagacagtaagacacaagaggctgacctcccacacaaaaggcagctgttccagaccagggggttcaggggctcatggagacagtgtgtgaagaggcaggaggacgcttgccttggagacactgtgtttgggagagaactttgtatctgagtgttagaactgaggtatggaaggggagacttctattgtttcatatttggggcttagggctgatgatgttgacacagtgtaggtagtgattaaacaaagacaattgtgattgggtttagaacatgccatatcctttcaaaagtgttatgatgatgtaaagaaatactgcctggtgtttcctttgtttgttttcagaaaattgtcattgtgattactgttttcctcaaaaaaaaaaaaaaaagaaagaaagaaaaaaaaccaaacctcagcgcactctggtatagtgggactctcctgaccctgccttctctactttgcatcagcagcaaacacggtcttccctgcatgggaaggaggccagagagggacctggaatgaggaccctgtggctagactgagcagtccatccctggaactgaaaacagcccaaggaacatttccaggatgggtagatgatttccccgatgccaaaagcactaaattcagatcaagtggagccttgtaccatcaatcaatttatcactaagggcttattaaaactggaacggtgaggggaacgcatgtccggggaggtaggagatacatagctgccatttcctgccttgcctcctgaactgtatggtagcaccatagcctcggatcagactagccaagcagaacctcccacctttaccactgcttcatgccaccttctgagttggacttgaggtccacaccctatgcagatgtcaggtctcatggaatgtaccttcaagacattcatcttcaaatcacatatacagtgaacaagaaaggcttttttaaaaagaatcaatgtataaatgcacattctgcttctagattcttagaattttttggggggaggggtttgccctttagtcaccattattgttagttttgtttgtttgagaaagggtctcattatgttgcccagcctggtctcaaagtggatatccttgtgcctcagcctcgcagttctggttaacatgtgtgcacaccatacaccgttgtttccaaattcttcagggatgagaacaccgatttgaaaagcaaggtgtagtaaaaacagcaaaagcttctgataggagagttgatttttttttttcaaagaacatatcaaggtgcttcaaaagagttcaagtgaccagctgcaaactaattacatcctgaaagagtgtagaatgcttctgctaacaatacataggaaatcacagacagtgggaatggaggcagaggttggagagcagcaaatatccctgttttgaaatgagaaatgaaacccgagactgtaaggcttcacgttgacccttgttgagaacctacactgaattactcagaggccagggggctatttagcaaagataaataacatcactaagtactagcagggggtgtctttgaaaaagccatggcaggcaggctaacctcatttcactttttcagcagggtttctaggttgatagatgggaaaggctaccaacatggtgtattcggttttagtctttcttgataaccttgagaagggacagatgaatgtgggtgacatgaaagctcagccacatgagttcaacggcacttgaccagcttcaaagattactggtcaatatattcacatcaacctgcactgctggcaagggcatgtcacagagccctgtcctggttcctttacaaacatttcagcaatagtttatgtcatatctatttaaaaaacaacaacaacaacaacaacaacccaacaaataaaaatcctcaggaagacaagaaaatacttgttcaaaaaatttaaaaaagtaacattaatgatgagaacaaacacttcaagatggagatgcactcagtatattatggttggactgtaacccttacttagctcaaggctaaccttagcagttttagagaaaagacatgtatggtgtgagtgtcacctgtcccatatcaactggctctgtgataagaatgctgaaaaaaaaaaaaaaatgtcactctggagtcacgtgtacagaacgctggtgtccagaataagcaagcaagctaccccatcctctcagagcacagcgggaactcttgggtgcatgtttcaaacgtgtctaaggaggggtctaagtgtcactcaggaaataaatggggggtgtttctacctgaaggatgcagacctggggggggggtaggccagtttataaccactctaaaagaacatctcttgaaaggagaccgggttcatctctgaagactttgtagaataaataaccaaaactcagtggacaggattttaacatgggcaaggagcaccgtatttaaggcagttctgcagggagcgtcaagaagctcccccactccaaactgtgtcccgtgtgtgatgtgtatctgcaggctggaggactttctatcaccagtgctgctgcatctgagtcactggaaaccagaccgggcagagccaaagcccagaacgccaaggctcatccctacgaacctctaactgaaggctgtttcctgagactggaagagctctactagatcagtcatcaccttattctccatggcatctcttggtgctgttaaaaggtacaggtgcaatggaggaggaatcctttcagaagaaacagagtgttttgggttaaatattacagagggtgagatgggaattacagggctccaaaacaagcagaagacagagtatgctcaccaagtcaaaacaaagccttcagtgcgacttgagagaaaggttttctatttgggagacataacacgataggaactattagccacagccttgcactaccaaacagtcatccatttgtgaactgcacaaagctgatggctcttctgggtcacattttcaaactgtcatgctttagaatacaaagcagtaaatagacacctaaattatcttaagtctttacggaaatatcaagctacatctgtcccagaatcatgcaaggacttttacacaattgctcttgagacctaatttattcttcttcagtatctcttaaatagagatggaggtctcactcaatttcctacccagctacatggccatcggaaccctaaccctggatgggggcgttagacggagtttagtacaggtggcatttctccttgagatgggctgagttacttactgtattagtaactgactctaatgctagagaaacctcaccacagtaaggatgtacatttttttttcttcccagtagcgttttttctaaaaggaaccaaaaatacgacactgtatctaattagggccctcctaatttgagcgcctcctacttgagaacccagtttggtaagagaaatacaaaatataaatagtgtcagttgctttttctagaggatcgctaacatgaaatatacatgggtcatgcagcggtgggaaatgcagcatgtgatctacagaaagtacctaaaaatgcaggagctagcacaatgaatcttaccagggcacttttgaaggagaacccaataagcaaatacataaattgagccaggaaaagaggaaggaccacagaatatccacatgcctaaaaacatttagataccctttgcctacagtacagctaaagacatgctcaatagtcagttccggtgaaactgcattttctgtttctggaactaaaaaccatggaaaccgctatcagcaaggacactttcttcacagtgctcggaggtcccttcacctgcctgatgaactgaacacagtctgaaagtttgattattaatcgctaaactattcaaggaatctggggttatattaacctcccaggacagcaatgctacaggctggggaaggaggaattgctctactgtgtacaccgggaaactgaggatcaggggaggtaaagcatcccccagctaagtgacaccagagtcaagatttaaatggaggcagctgaggctcaaggagcttgtgatgtgagccctgggctctgtttttcccagatatgaaggaattctgttcacaaaggtctgtatttgggaatgggctctgggggcggggtttgttgtagtcatgtgtaccaggatgtcacaaatgcagttaggcaatgtaaatgagctatgcaacctgtcaacaacaggaaactcagactccacattggtggtagggatggcggcagctgagaccacctgtgaccaccaggtgaagagaacagccatttcttcccttctgctgacacccctcccaacacaccgcgctccctgaaagttgggcagaatgctgtcagatttttaagtttttccaaatgtgtgtgggggggtgtcaagaaacagaagcttcataaatttgcctccccaaccatacagagccaaacaaaacaatcttctggatacatgaggtgatgtccctataggtgattaaagcagaaggaaccaacagccactattcaaaggcccaggagcgtttaaaccttcacagactttctcagcccttctcagtgatccagcagacccaggctcaatcagcaagcaatgtgattgatactggaaggcctgccaaaggctcaagtacatctggttggagaaacagatgttacactctcctgacagaacagcaaaaaaaagtgagaggtctgtgcagagcaatattccctacttagttgcaatttcctcacagcagaagttgatatgagatgcaaatgggggtgaacagaaacttcagagttactaactcttggtttggacaaaataaataaataaaagagaaattcatgtttactccaggtcaagagtggacttggggtcaaatttccgtcctggattgtcaatgagcagttaatccaaactcaagaagatgggggatgccctttgtggccacttcagaatatgtaaaaggatgtaccctttttcaaaaagaaaatactgaaactagcaagtacaggagctagggggcttgatgggttgagagggacaagaaattctggctcctcaatagacttttttcctcctgtccacatcactgttggaaaatgccacatgggtcagaaaggctgaagagcgaaaactcctggtggaaagacttctacttttcatgctacttaatctttctagccacttcttcctgcctgccatgcaatacatcaaagctatgatgaagaccccaaatcacaatttagctgagtggtgggccactcagcaggtgaagagaacaacaggcgttcctggtgaaaactgaaggtctctaacaactgacttgtctgatcaggcaattgagagagcagaaatgtcggcttcccgtggaaatcagagtcagctttcaaaggaacataccactgcttggaaggaaatcagagcaagtaaccaaaatcaactaactccaatgaggcccaactagttaactagtatagggttgactaatgtatggagtgtctttgcctcagtttccaaatagttaaattcattgtttaaagtggtcttgcctggcccagcaccgccttcttattggtccatgaagaatgagtgaatttgctgaactactcctctgaatacatactgcggtaatacaagagagaagatggctcacagaaatgcaagcattaggaggagagaaatacaacaatttttcagaggtgtctctctctctctctctctctctctctctctctctctctctctctctctctttctctggaagcagatcctttattaccataaaagattaccttaaatgcatctgcaattctttttttttttcctatggtgtcaacttcaaaaacaaataaaacaaaaaaattcatctcatcatcgctcattcaccacctcgctcaacagagttcctgaagaatcctttttcggtttagagtcctttaacaagtcctctaatctcattccccaccatcttaaaccacacatggtgaaacatcatacaaacaccatcagtggccatttcgaagggtgcaaggcaactcaacatcttccaggacaaaaagccataaaatgcaaattagagagagagtcctataagccaagtgcaggtcttaattcttagcactcatgggcttggtagaagggaaggagccacacactcacctatctttgtagtttatcacagtatcgatgatggcgttcatctgcttggttagtttgggggggtttggtgacagtttctcagctggagggcggcctcttcttttcttcgccttttccacatcctccttcacaggatctttctccacatttcttcgtctttttctcttcttgagccgtacttcctcctccatttcttccaaattgccgtcttcgatggcctgtaaaccaggaaccaaggaggaaaaaaattcaagtgaagaaaataataaacaaaacaaacatacccatacctttatagtaaggggtatagatacatatatcttgaataattagaataaaataaaactaactaacaaagtaaaactaaaagttaacagtcatcaatggagaaaaaaaaaaaaaaaggaaaagccactaccatgttggataaaacacatctttaacctaagtttatattgtaaggcctaattattagagaggcagatattaaagcatctatatattcaagtgcttgaaaatgactcaattcacgtgaaatttatctcaatataagcaaaacattctaaaggcgtcatcactgataaggacagtaacaataaacaaaaaccagggtgagtgaagaaaacaaaataatccccaaagaatatatctatgcagtcacaagagccccgacctttaaggttttacatcaattgattcatgattcacaacataaatcaacaattccatccagattttggttctaatgcagaaatcagtaaacaaggaagcaggagggaagtatgaagccacattccctggtagacgcaatgaaatcacccgatagagaacacacactcacaaacagcaaaaacacttttcccccaattacctgcaaacgcttgctttaaaccagagccagcagcactaatacagaaagataataaaatagctataaaaacagccaggtgtgaaggggacctgttcagaaaaggctaaaagatccacgtgacaggacccacaagttcaaacttttcttttttttttttcctggtaagtctcgaaacttataagaaaaattaagggaacaaaaagaaaaaaaaaagggaaaaaacagacaaaagaaaatctgaccatggaaaagaaattttctttaaaaaaaaaaaaatcttaaaatgacattttgagattgctttctcacacaaataactgctgctgctatttgttcctccggccctctctatattgcctccactgtataaatgctaatcaatcctctgctagctgaaagagctctaatcataaggcaattaccttcatttctccacagcaccaaacatggctaatatttatgatcatgtgagtataacaatcaatataaagagtgattacagctcagacgtaatttctttcacttatgtacaatgcctcctgaaaaagaaaggttttgtgaagaaaacctggtacagaacacaaaacaacctggcatgttaaaaacgccagtgggatcaaaaaaaaaaaaaaaatgtttcaatgcactctctccaatgtgctaatccacagaagcaacatgcacacagacagaatcctaagggacaacctgagcccaggccttaataatcaaaagacaatttccgtcaccatcctacagtgttcagataaccactatgaaggaggcgagacctgatgagttatgaagaaaaaggagaaaggaaaaaaaaaaagctccccattatttcattaatattcatttgcctaaaagcaggacacccactatacagctaaacacactgcagctaagcaaagagaagagaaagaaattgtcccgagtctcttgtaggctgaacatgctaatcataaatacagcatgcaagcctgtcaacagttaatggtactgctctcctccagcacccagttgcacacagaaatacggagaacaccggcttttgatgtgttacacacctacacatgcctgggatgtagtttctactgaatcttcaagacggcaacgaaaaaggatatttaccttaccactatcagcaggccggctatcggaaatcacagttagtggggataaaattaacaagccagcaaagcagcgagctgctagtctcttcatcagctgatcaggaaaaaaaagagagctgggaaaggctatgttttcatatacaagtaattttattttactgaaaatttaatactggaaggattgtggatactcaaatctgctgtttcattctacctacgaccaggccccaagccttcttcctccagcctgttttaatattgacaactacttatcatattgttccccccttattattccaggcggcagaattagagatttttagctcaggtggtttctgattcttgcttgcattttaacaattaagccaataagaaaacaaatgaatattcaaatgtattttaagagattaaagcaagatatgctttttgttgtattttttgcttcatcttagtcgtctttttttttttttttttcagaaaagatatgctgcatggttttggagcagtctaaaaacgatttttaacacaggagaaaaaccattctccccccactagatgcatgtaagtaaaagcattgtgcatgttctcaggttcctgtattttaatacagtgttatttttctctgtaaagaaaaatcccgaataactgtgacacttcactttcggttttcatactgcaaaatttttcattgtttttcttttcagtgggatccatgaggaggggggaagtttgtgaaaagagtatttctgccctaaccaaccatccctccccccttaattctggaaaaaggggaacaaagcttaagcttgtgatatttggagttttaaatttctatgtctttgagtacctaagaaggggaaaacaaattaaattacaaacagaactcgtcacacaaatttttattacaattgctaatactgcagattcttattaaatttaggttctggagttacaggagatcacacaaagtactgaccattattccccttaaattaaggcttttatgcaggaatgcagagagctacaaaaatcttccctcctccccaaagacccggaacacatctaaatcagggattcaggttctgtggtttctaaggggctttttctaatggaaatcaattccctccatatttcccaatgcttttcgtacttcaagagttagacttaagatttctcctgcatgtaagggaaattatgggggcttctctgatttaaaaaaaaatattatttaagctagctcaacggacaacttagctgggcaggggggtgggtaaaaaaaaaaaagaagaagaagaagaaaagaaaccaaaacaaaacaaaaacaaaaaacttgctacacaatgctaaaagtattacccccagaaagaattcccttccaaaccttttaccagcacaataatgaaataaatctcaggagcaaacccccagtttccgactggtgacgtgttgcgcaagagtgcgagccctaattcaacatacagacggctcccatgctgaactgcctctagatttaatgaagtgaataggaaggaagtcgggggaaaaaagtgtacaaataagaaattaacgctttccttccctacctaaatggtgaggcacaactacggggaagtttggtgaggtacctctttccttaaaggcacactgcactcatttggctccggatgtcacaaagaaccccatatggtgctaaaagggtccagccaagttaaaagagttaagcatactttagcctgcgtgtgagtgtgtgagtgtgtgtgtgtgtgtgtgtgtgtgtgtgtgtgtgtgtgtgtgtgtgtgtgtgtgtaagcttgctttttttttttcccctgaatgaagctggaaattactccttcctccactggatggcaaccttctttcccccacccccttcctttctcgctctcctttctttctttcaattttgctcaaaagaaaaatacgttttcacgaaacaggatgtgcatgcacaagcaagggagggacaggcttgctctccaatgattcttaagaagcagcggttctgacgaggacgggcaggaggcggccatgcaggaacagccgccgctctggagcagacacaggaggcttgcgagcacatggcagccccggtaatcagccacacgtgctggcttccatcgtggccctctgtcatcccgacacacgccaactacatcttccactgaatgacggaaggtctagaaagcaggcattaggctccttctcagccggggggcggggggtaagagaggcgggggtagggggagggatgatgaggtggagttacacgtgacaagccccccccacccccgcccatcacagtcaagcggctgcgattgtgaataggtaaacaggggcatgtgaacaaaaaggcgctctgcccattgttcccacccttgcctctccaaatgcaccaggcagtgtggctgggccccctcaccatgacccaacccgtctctagatacatggaaagcagcagcaattctggagatcattagactatagatggtaaatggaaagaaacaaaaacgaaacaaaaagagtgttctgatactaggtctgatatttgctgtaccccttccctgatagggatttcttccccccccctctgggtgttggtgggggaggctccttctttagggactctaggagagagagggaggggggagagagaggaggaggacagggagagggggacagagacagagagaccaggctctgcattaaagaaaggatgtgaagaaaacctatgaaaaaaaaaaaaaacacacagccgtgttttctggggacaactcatctccaaaactgaggataaaatcctgaaaggctaagtcaggctccttcagcccccaagaccctgagcactaagaacacagacacgatccccaaacctgaagagttatgctaacaaccaaaatgtagaatttaaagagagtttacagttccattgtgaggcatattcttaaaataggaatatgaaatactaacaacaaaactgcggccttgcctttcctccacagggtggtaagagccggttgcagaactctggacctaggacttggaccaatgtctaaggtttaagacataagaaaggtgtacataaaaccaaataccctccagggaaatcctccagacacaaagggacaaatactgcgagctgccattcccaggacagtagctcggtggtcacctgggctgcagggtcagggaccataaaggagccctggtgtcgacagctgcagaagattttgaaggcacttcattttactgatgtgtgcacttaaaatgatgggaatcaaacattctatatatgtatccctgtttttaaaagtggtcataaagaagctgcatcctctacatattgaggagaaatatcccagccactgcaggtccacacatgctgccacagcctcagcacaaaacgcctactgctgggacattttggcagctttccattggaactcaaatctttcagtatcccaataggtggcacgttcagtcttgtcctgcccaattgaccacggaccctctcaagaaaacctacttatcccctccatccattgtttttgaggaaatgcccactggtgtaagaaaatacccacacacagagagcatacctgttctcaaattgtttgctaacagatgcctcacatagtcaagagatcggctcatctgaagcctaaggagctcacaaaatagcattcctacccacatgatggtacaatgtactgatgatgcattcactcaatataggcagacccccatttgaagatgaaggtagacatgtagcccatgctggtcttgagctagcaatcctcctgcctcaggctccagagtgctgggattaaaggcatgcaatcattcgcttacttcaggcatttatcggcagacgacttgaaactcaactgaacttgccattctccctgaactggacttaaatgttcaatgctggccctagacctagatgggaagcaagcagccttggcttgccgaatttctggtacagttgagttttctagtttctgttcgacaacctcgggtcactattagagcaaagcaaaccaaggtgtttccttggcttcagtggtattgggggccatttaaagagctggggtaggtgtgaggtgggagctgaggttataagaacatcatttcagtgtggcatttacaacaggaaaattagtatatggagaagcaaagttactttaatccatgaaatccactaagaagccatccacatgcacagtatggtgataacatacttgtaatctcagaatctgggaggccgatcacaaattcaaggccaccctgtgctacataccatgacccatttcaaacaccccttcaccccactcttaagcaggttggagctcaacactctactaaggaataaattttcatagatagaagtttccaaaacgcctggccccaggaccctaccaaacacttaagatcactgagactgaattatatagccaggcacatgcagcactccaacttacatggcagaacaaaagaatatgagagaatttgtcaccctgagagatccctagccaacaagaagaaatgcagttcaacttttgtatcccacggccacttgtaaagccactaccaagtcacacactgcagacacctctctctgcccatttttcccttgagctctccaagaaggcctaggtcatttctccttcgaggaaataccaagagggagcagcgggttattttggtagaaagccactgcttactgggggcaatgttaacaatatgaacaccgacaggaaaactgcaatgattaagattgtaaccacacttggaggttacacaggaaaggtactccaagacaccttcataaatgcaaggctcgagccaaaccacctctcccagggttctctgggctgggctgggcaaggcagtccatgagttcctgagccttgatccaggatcacatgttaccaccacatggcaaattctctggtctctgcactcactcattgtggatgaaagcaatgaagtaacagacgagcctgggctaagaatgcggcacttgttctacttgcatcagatgcaaaggatgctcatgaatggcacaagaaggaggcaggagaacacatacataaaacaacatcaaagtgtactagtttgaggccttctgagaaaggaaagccccagcctcaaccccaataaatcttaagatacacagggccactgaggctctttgtgtttttatttttggacttgtagtagttctttgaggaatttattcagtgtggtttgatcatattcactcccttcttagaagaggtccttctataagtaacctttatgtcattacagttttccttctgtaaatcaaccaacttctctacttttgcctgaataccaaattttccaggaattattaccattgtggtcttcaatctaaaattgtgtgctcaatttcagccataagtagcctcctgttcccagtgccatttaaatggaaaaaaaataatgttcagatgtctttactgtacttttatagcaatggggtgtgtggtacctccacacgggcccagaactcctgtatgcttcactatgctgtggccatttcaaatctcttaacacaaccactttcgctttctgagtcacttcttgtttcttcactctgtactttcaccatttagtatctaaacctctcttttgatgatctatgttggtaaaatatcacacgcatttatgactgggagacgaggaggcaaaatacttgtatgcctcaccgtgtgccaatggccatttagacagagacaaaccagctgcaggatttgaaaggaggaatgagcctcatcaccgaaccagaggcttacctcctatttgctgccagaattacacctgaaaggctagcaacatctgtactttatacacaacaattcataactgctacacccatggtgttatggtctaaaaatccatcgattgggatcctaatccccaatacctcagaatatgactgcatttgaagatacggcctttggaggggcaattaaaataaaatgagtaaaatgaagtcgtgttagtgggctctgatcctatatgactgttgtacacaggtacacatgggacagtcatgtgaaaaacagaagagcatctccaagacagagaggggctcagaagaaaccaaagatgtcacaccttgatgtgacatggtctgtccccagagctgagaaaagttcctatggcagtttaaattataggctgtgttatattgtcacagctaactaatacaatatggcaactgaaatgtattgttgggaattagtgcttaattgtagcacagtgatggaaatgcacacctattggtccaaagcaagtcacacgtgtgcatatcattttgattaagtgatgaaggtctttgtcttccagggcattctttaatctaaaggaaactgttccataccccacacctgctgcctggacagccatgtcctaagttgggcaacttccccctgtccttgtcttgcctaacgatctcttgttttcaaggtatcctggggggttctcaatgacatacatgagagagattgaattgctacaggcattaaagaatatatccgtgggaggagaagctgaatggggtggcacctaggccagagaagtcttgagttgaaaacatgaagttgaaatagccctctatttagagggctacttgttcagagcacatagaggagctggtcccaggggaactgggattccttacatacaagacgtgcatttatttaggctgtgactagataaaaacatgtacacacacacacacacacacacacacacacacacaccaccaccaccaccaccaccaccaccaccaccaccaccacccacccctattcatatattactggggcaccagggcaaggaagactatgaggtcccacacttcctacttagtacattgagataatcaactattcattaattgagagaatataaaagcatgactgtcttaataaagccataaattttgggtcctggagagccatacatacattgcaaacaaaacttcctctctagtgaagttgaaaatcagtctataattctgaagtacaaagaagtaagagtctgaattaaatatgactaggtctggctaagacacacacaccctttgaggagccttgcatggcctcttgttggtactctaacctggcagggctggtaggtttgctctgaatctatagctgacatcaagatgggaagagtgagatagcagataagatgcccaaagaaaatcaactaaagcacactcagagagtggcaaagacagacaaacacagggactggctctaatggttgtgacatgtgtataaagaaaatggcccctaaaacacattttagaaatggggcatctggagttttagaaggtgcacacctgccctttagtaattctttttttttaactgttttttgtaattttttttattagttcaaattagaaacaagcttgtttcacatgtcaatcccttctccctctccctcccgcccatcagtaattctgaaggcaagggcctgcagcattgacctctgaggagtgtgtcccagcagagatcgtcttgccagagtctacccgaatgtgctgagacctgaacctcggaatttcttttggtgtcacataaattaatgaaataaaattgtggaaagcagtaaggttcttgggctgccaagatggtaaaactgtttgctttgaagtctgatgacctaaggtctactcgggatccctcatgaagataggagagaactaactcaacaaaattgttgtctgacctctgcacacatgtcatggcacacatgcatcccccccttacatcatacatacatgtaacagtagtgaataaaaaattacaagattcttatttctaaaaaggtgaacacacattcaggattccaaaagaggtttatttctttaaaagtaacgtgggcattagatcaggcgaggcttgactgttggaatttgggaagcatctatactcagtatgctttgttagcattggttgtcagtttctcactttccctaaaaaaagcgaagctgggaatcctaagcaacacacattacggctattatttctgcaggaaagattgcagagtgttctagtcaggaaacggaaggggacctcagcttccctcagaacatggcaataggatgctcctgagtttctaacttatggctccatctgtgacaccctgctgggcctcattcatctaccttctctcaccttcctggccaggtgcttgctctgaccagtaaccactggctctgactgagcagttatggagatccctttgttcttttaggaataaaggggtcacattaccctgcctgctctttgcgattttgtcctttttgtctttttgtaatgctatcataagacttaatacctggatgccatgtctgctgaacccccaggctaaggattaaatttagggcctcacactaagtcccttaccactgagctacattcccagtctgtttttttgttttgtttattccttttctaaaaaaggtatgggacatattctatttgcgaggtcctcagtcattttcaccttcttctgccctacttcttccattcctctcctttggtcagcttagcaagtccaagctcatgtgcctccaagccaatgtcatatgtcatcattccctccatggcttacatggtactggtgattgcatcctcagaattcctgtgttgaaatactatccctcaagccaatagcaccagcttgtgtgaaaactgggaggttattagttcctgtaggcagaaactctgtggctaggattagtgccctcagaaaacagactccagtgggctccctggccccttcaaccccaagatgacgtctatgaacactaggcagaaccaccacacagcatcttctgagactttccaaaggttcttttaggctgcagagttatgaggaatagattgctatcgtttatgacaaacacagcttgaggtgttttgttacaggagtctgtagtaagataccagcaatgtgaatattcttcaagcaacaggaactcaaaatccaatgtcttcccatagcagctgtatttgctcccaactatgagatcccctctctcacctgggacgcctgtcctaaccccctgtacacgagcactttgtatgcagcgtagtatttgctgtagctatttcaaatgctaagccagaaacacaaggtctccttcttctcccatacattgctgagctatttaccattatcacactaatgagcccactttctgaagacacggtgtatccaggaagccacagacttttttccttcaaacgttcccaattcccatacctgtctcctctagtcttttcttattttgctccccccaccattactgttctttcacaacttcccattctgtactgccagtcttgggtttccctgcttcatctaaccatagttttctacccttatctgcaaattctccaactttttctctggctctctttccccccatggactgtaaatgttcaggcatatgtggtcagtggcttaaagactgtgtagtccttcattagtcttccgggaggctcttactgactctcggagagtttgctgtcaaagaagcgcacaaagaagggccctaatggagtacaaactatatgcgtcaacctactgggaaggctatcaatctggctgctcctgtataggagggctcccgagtggcttggtaataaatccataatcttcatgtcttttaagaagccactaactagaactactattggagggcatgtctcccaattcctcggatggatagatagacagatagatagatagatagatagatagatagatagatagatagatacatagatagatttatagatacataggtagcatgtcttctaattattaggatggatagaaagaaagaaagaaagaaagaaagaaagaaagaaagaaagaaagaaagaaagagggaaggaaggaaggaaggaaggaaggaaggaaaaaaaaagaaaggaaaagaaaagaaagaataaatctcctgaggagttccagtttgcccaaaatctgtgtcacctgtatttctttttggagctaccaactaagatttctacatcctatccagcacttttatcactttcccatcagccaaggcaagtatttgtctccgtgaatctttctgactcacctatgagagcatcacaccctcccctatccagcctagaggtttctctatcctatcggccatcctataggtcacttctgaaatggcacacagaccgtttctctgtggcatctttgccctggaagcgggcctctgtttcaagtgagtgggtcattctcacttccctcctcttaataaattcactgacattgcaaacagttcaccaccttgctgaaataaaataactgtttactcctctgttttcttgaaacaaggactttccaaggaatgacattttaacaccaggcttcagtgactaattcaaaggcctcacaatgcattatgaactaaaacaggccagataaactgggcaagagaggacccggacgttgtgagataattttttttgtacactttgaagatgtgtctaaggcaccttctgattggtttaataaagagctgaatagccaatcgctaggcaggagaggacagttggaacttccagacagagagaggaactctgtgaagaatctaagaggtggggattttccatattagatatcaaggacaggtaacgagccacatggcagaatgtagattaatataaactggttagtttaagtgttacaaactagtaggcaacaagcctaagctgaggccaagctttcatacttagtaagaagtctccacgtcattattcaggacctagtatcccaaagaaagacctgtgtagcaagctttcttgtctgactatcttttgactgccagcccacaaataatgatgcagagacttcttattaattatgaaaggttggccttagcttagacttttccccaaccagctctgataacttaattaacccattttttttttaaatctatgttctatcatgtggcttggttacctcttcttagtatagagcatctggcttgctctgagtctacaggtgaaatcactcaactaaatgcctcctcccagtttctttctctgcccagaagtcgcctcttctgtcctacctcgctattggccatttagctctttattaaaccaatcagaaggtgccttaggcagagacacatctttacagtgtaaataatattttgcagcatatctgttacacccatggttttagtttaccctgctgccacctatcttgctttattctggttattttaacaggtacccacacaatcttctgtcctgttttagctttaagagttgaacagcatgaaaagaaaatccagaccaacaggtaacgctgccatctctgagctgagaagtaataaagtcctcagttcaaaggcagagtagtgtctgtatcatgactgaatgaggcacagtggagggcagggaagggctgagcttcccacaaatgaaacaaaaccatggtagagacactgacctacaaggtataaaaagcccagagtccagctgcttagcagaaagagatccacaaagcaggctctctgtagtttcgacccagctaacagtcgaagaagtctcatattcccccaggaggctctctcaattgatctaggctgatccctccaaggttttcacacccacatgtttcccacctgcttcaggctctgcttttccaacaggagggtagaacacatgggccaggtggtcatcagcaggggtggcaatcattgatctttaacaaaacttagatgttttgcatcatcaaaatcaaaaaggcagcagattcaacattggacattcactcagcagatacacctgtcatgaagaagatgggaaatcccaaacccactccaggtttgtgagctatgggagaaattatatcgattccaagtctcttggtgactaaatggtggcatggatttatagcatgtaacctgtcactgtttcacacagagaaaggcaggaaggaaaagaacccagagaataggcctggtttggctcaaaagcagtcctgtaagctagaggtatggctcagcgattgagcataaaaaaaaaaaaaaaaaaaaaaaaaaaaaaaaacacacacacacacacacctttaaccccagcactctggaagcaaaagtgggtggatctctgagctgaaggacagcttggtctacatagggagctcttggacagccaagactacatagagagaccccccatctcaacaacaacaacaaataaaaaaactacaaaagttaaaaataaaacctatgggaatgagttttagttaagaattttgtcttggggagaagagggtatgttttgcccactttctaataattagaaacagactagaataaactcaccaactgtaaaacataagagaggcaaaagggattttgaagggaggacagacaccctgtgagacacagaagccctattaatgggcagaaagaaaagtcattttccagcttgggatggcatgctgctacacatcggccctaaatacaaaaggtagtctgctggcaccaagtgcctgtaaaacaggcttcctcctggtaaatgccaccaacaggctgaggcttgatgggcatctcgggtggagctgaccgggtctactgccaagtgtggagcctcacaagaggttgagaaccaccctggatgcaaagccacccaaatggcttttcaataggattttcccttggccctttctccaatatacacaaaggtcagtgagagtctattgtttttcttccactcttctgtattttactcctttttgttttgtttttaaagatgggccatgctcaagtctcttacataaacagcacagtatacatacaaaacctaggcacactctctcagagcctaaaatcatctctagcgtcaacttactcacttagattccctaatatgatgcaaatactatgtaaatgattgttgtgctacattgtttagtagtacaatgaataatgtactactataatgacaaacatctatgttcaatatagatacatttttttaaaaaagcaattttgatctgtgactgcttgattctcaggatgtggaatccatgaaccacatggttatctataccatgacactgaagtactgtttttttttttttaagcgaatgcaaatggatttgatcttgataagttaaggaaaaactcgatgttttcaataaatacaatgagatctatttaacatctttaacatctgatatatactctactacgcagtggttggcaagggatcgaaaaggcagctaggtaggctagacaatcctagttcttggtctgtacggaactgatgaagttcctagtccctgtaagaagttgtgcctgtaggcctgtggcagcagttgccccttcaccatgttctacaacactggcaccttacctatcatggcccacagccacacaggactggccttagttcttcaaatgccattcatagcataaccaggatgtccctaaagtctacacagggatcagttactaagtccacagtcccaacagaacagacttgtcaactctacacagtcaagaagaacaaccacaaagaaaaacctctgagtcctagtccctgacaactgagacttacagaattggagatggcccaggacaagtctgaatcagccctccggtggtcaccaaaggcaatgctgaagagtgacaaggcaggatggaggggctctgtctacccctgctcccatttcatgactccactgtgcagacagggaaaccgagtcactgggtggtaataaagctgtctcagtcacattctcccactatgccatcagaagccacagcggcatagaggaagagtcacactggcagtccccacagcttcaatttttaaaacgtctttgtaaaacgattctacaaggttcaaatgccaggtaattttttaaagaatcatcatcacacactttaggaaggtgatttctgtgatgggctctgagcagcacggtgacctccaatattacactatagcaggaacagcagtacaaaagcaaggtgttgtgatcctgtccacagatttccttcattctaacaattctttctctctagtgggaaagcgggaggcagccacatagacagcatcccggtgatacattttcaatctatatactcatacctgacactcgcacaaaatgaaaagaggagcatccagttcctttagtactcagtgtttctaattttaaggttgttgagactaacccgacttttactgagatggagttcaggttagaaggcagccagtggagaacctagcaagatttctgggaagtagctaggtggaagcaatgcttgtacattccatgcatttttacataggtcccatccatgctttctgaaagagtgctggcgccttcacagttttgaaaagttcaagggcatatccgggtccaagtaacacaccattaggattgttttgagtaggaaatcattatgaaggcgtggatcactaggatcccattggagagatgctggtaatgcctatctgccttgacttgcattagcagaaagaaaaaaaaaatcacatcattctactggctttgccaaaaggataagggctgcagccaaaccttctctcctagctctccctgctgcctgcaccatgtccatttattcaaacacttattaagtgctggcaatgacggggttgctgctccagtttctgggatacaccaggctgtcccaggagttcagggctggtgggggagaactgcctttaggcagaggcagtgccatgaaaacaatgtaccctatgagacaataacaaacaccattcagcaaggggggacaggaagggtctctgtggaactcatccagggtgtagagtgccagaaagacagtcctgtgggccagcttcttaacagtgagggagttgaaagccttatagatcacctgcaagtatttgggttccactcccctatggctagctacagtggagtggagggaatgaaggcagggcaatcaaggtgatcagagtacacattctttccaaaaggtttcttcggaatcctctgggcaacttgaacaaagatagagtcgccctctaacatgccaggactctgaacatgtcacatgctccaaccttcactactttgcactcaagttcctgtttcttttgtcagggaatgtgtgggctgtatttctccttcccccaaagccaaacagagctgacaggtaacaaacatccagctgttgctgttggaaaggctggagtctcacttgctgtgtgtacgcttggagatccactctttaccagcccttgcgggtggctaacagcagcaggaagacaaacccagacctcagggacagcagccctctcctcctttatcagtcggaaggcggggctacttagataccattcccagagggctgacactgccatggtagcattatgcagaatatacgttgtttaaagcctgctcatttcctgcacagttacaaacccatcttttcgtctctgctaattctcacttgctgtgtgtacgcttggagatccactctttaccagcccttgagggtggctaacttgcaatgtcattgctaagagcacctctcaagtctggcttttaattgcattaataaatttggccagctgtgaatgtgtgcagagtaacaacttaatacactgcccacctccaaatacatctacggctcaatgttcggtacatgatcattaaattgaatctgttcatgagcacacgggtgacaaagcaggaggggatcattattaaaaaaaaaaaaaaaagtcacaacaaacaaagcaaccacagcttcctgtgacttcggaggtttcctttagacaatgaatggtaaagctccgcacatcaaagctgcagatgagccacaccttagtttgaggtagaataatcaagtaccagggatggggcagcccagggacaggtcacactaatgtgatggtgtgtaatctgacagcatagaggttggtgataactattcgggaacatgtttctgagggtgtttctgaaacaagaaataagcttttcaatcggtaaagccaccactgtgactctctccctgccctgagggccagggaagaaaaggaagaagagaaaatgagaactttcttttccagccacgcagttcatctttgtccggatttctgattctcaggcctctggagtccaggacttacaccagcaatgttcctgccctgggacttcgattgtcagatatggactaagccacattactggctttcctgtgccctagtagagagccagcacctcacgggagtctcagcttccacaatcttaagcaggggcctacactcagtcgctttctcagtactgatcctgctccttccttccttccacaaaataaaaccttacaaacaacacggttctgtgtgattgaagtctgagaactgtctgcaatacaggggggttctggctcttctgccttttcctgccagcaggaaaccaactttttttcttgccgtcctcacacttgggaaaggccagtcaaagatcacttgacataggtagtagcacacactctatggctgccagcccccatattctttctgtaagcatgggctaaggagaaaacattagtaaagaccattggctgagggagtctaggttagcaagcagttgggagaaaactagattgagccagtgaactgctgggggagtttaggttagctggcttgagttggataagcatatggccagatgctgtcgcaccttcagtgagcagacatgcaattgccatcctgtttcatcccatcagtgaggagtcccttacctttctcctgtcaccctaaactttttcttcaagacacacagcagaattgtatttcttctattacctgttagggctttctctgaaacatatttttcttagaagggaactcttctattttaggatcctggttctgtataatacaatacacattgaaacagagaatacctcctcctggaccatgttattaaaaaaaaaaaaaaagaacaaagaaggcgtccagaggttcaaagggtatctgggtcatgatgaggaattgacccttggtagatctcatgccttatgttctcagctcccaacagaaaatggctttaagtggcagttcatcccatccagacacttagataaggaaaatggagtcaccctaccctgacttattctcccttaacagtgcaggccccaacccttaccaaggatgaaagctagttattggtttgctaaggttgaatggggttttgcttgtttgttttttgttttgttttgtttgagacagagacttactatgctgccttgactggcctagaacttgctatatagatgaagctggcctcaaactcagaaatctgcccatctctaaaaaaaaaaaaaaaaaaagacttcagtcatctcaccttattgactttaaataaataaacaagccatcaaacaaataaatgccctgtgagattaaaccccaaatcttaatttgaaaaaaacaaaaaacgacacatttccattttttccattctctacagaaataaatgatttttttcttcatctcaagagaatatgaacttacagggtctcttttgtaccaatagggccagagcaattttccactgttatttttgatgactgagtttgatttgggagccaaatcctgatttctaacaatcaaattcaagaccagaaattctagacattaaggtctgaaaacagaaaaagaagtcagtcattcagcacagtgtcttcagcctcccaacctttactctttatttcaggcgaccctctgaggactattccttctgttgaatttactctgctggattctaacaaaagggaacgtactggggtcaaatggctgcttagagcaatccggccagtggatataaaataaaagcggttggaagttattaaaattactttactgctgtcaaatatttcctccaaacaattcatggcccttagcaccattaattagttcaggacttccatcctaaagcagaacctggaatgtggggaagccaaaatctattttctagggccttagctctcccttgtgtataaaaacggaaatgcagcttgctagaaaattctgccccagtaaattggatgacctaattttaaaacttaaatgccattagaaaagtaaaaggtcacatcttttaagtcttgtgtcttaaaaacaaaacagagattacttaaaataacaaaaaagtagggaattatatttgtgttatatatgttatgctttaggtaaagtatccaagaaatcttactggcataagataaaatatttttagagaaaaattacatttcccagaatcacagatgttctcagccaaaatatagttgagagattccagcctgtctctgatttgggaaggatcatacttcatccagcccaaacagagatgttatcctgtttcagatacttccagagagaagagcccaaagcctacctcttcataccttggagatcttattatttctgatgtatttcagcagaattacaaatatgtaattagaaacctccagcctcttagctttttcttgtatatgtttttcaagacagggtttctctctgtagccccggctgtcctggaacttgctctgtagaccaggttggccttgaacttagagtcctttctgcctctgcctctggagtgctgggattgaaggcgtgcttcaccatccaccctgctttgtgtatgtattgggggggggcattttatgattgaaatcatcagtgatccatccactgattctcccttctagagtttggcaccttgtgctggagtggccaagtccgggaatctattctgtctatatgtgcatgttgacatcgcccagcttttaaaatgccaaagtaaattccatggagaggtttccacctgatttactggttatgccccactgttatctcaagagtcctttgttttctttcatttatatcaggccttgggaaaataaaactctcaaagtcctcctcatggccagcagatgtgatcttagggaccccatcagggtacaaacatcataagaaatccatactttcatctgattccagatttatcaaaggaaagatacgggtgtgccttctttgctctcagaggttccttttgaaactttctgctttctgacaatacccgtgatattactgcctggccttatcacatttcaaagtacttactggggtctaactgctcagggcatcattacaaaatgaagggcattttccttcagtgccgggaacctatgtagacaacctcatccacagtgtatataaagacgcgaaaggaaacaggagacgccctgaggaagtgcacagggatacttagaaatttaagtgggagttttctttggcttccccgcccatttaactttttattgattctttgtagatttcccatcaaatttttgtgtcctccccacaacataaccccacatctcacctccaagctgaataccaaacccaagcccttgcacttgctgggcaagtgctcagccactgagctaaaccccaaaccccttaaatggaactcctcccccctcccagtcctatcccttcccccaccatctgttcccacaccccaatccactcctactctgtgtctggttaggaaagggcagatctctcatgagtatcaacaaaacatggcgtatcaagttgcactaagactaagcacctctccatgtatgaagactgggcaaggcgaccccagtatgaggagtagggtcccaaaagtcagtgaaagagttgaagacaacccctgttcccactgttaggagtcccacaagaggaacaagttacatagctgcaacatatatgtagaatgcctaggtcagtccggtgcaggctccctggttgtcagttcagtgtctgtgagcccctatgaggccaggttagctgattctgtgagggttttttttttttttttttttttttttttttttccatgtccttgacccctctggctcctacaacattttctcttgctcttctgcaggattccctgagcttgcctaatgtttggctgtgggtatgcatctgttccatcagttgctggatgaagcctctctgatgacaattgggctaagcatcaatctggtcacaggagatggtcaattcaggctatgtgtccactattgctaggagtcttagctggggtcatccttgtagattcctgggagattcccttatgccagggcaggtagtgaaatggatggggagagtattgaaagccactcctggaaaggggggacattttggcctcaggtaaaagcgggatttttcaaaacccgtatttttcaagacatcagatccgctgtgtgacaaaggtatgctctccaaatttgttgtctccacccaactgtaattacatattactcagagcacataatctacatcgcattccaattatctccaagtgctgcagggcaaaaatcactcaacttggcaattaaacaaattccaggttatcactaagcgttttaaggaagggaagcgttctgaagttggcaggaagaccaaagggacaggaagagcagagaaaagccttccagaaaccaccgttagctcaccctttagttttgcagtaaccccaacccgacaaagtccctgtcctcaagaacgatgcctgcactataagctagaaacctgtcgggcagagtacacagggctgaagtcaaatgaaaagccctggcctacccactgcctcagtttctgccaatataataaatggaatgcctgcaatcatgagtaagagacatgtttttttttttatttttcaagaaattatcaagacttcaattatatcatgagcacaaatagacaaatgcaagtttatcatgtaatgtggcactgctaacaccttgagtacacccccaaagaagttaccaaatacacagaatatttttaatatgcctttccacacattctagatagaccatcccttgtgcaagaaaaagatccattgtcttaaataatgatgaggataaggtcagtgaagagaaacaaacaatgccttcactttgcgaaccagcagtaggagtccagcagcagacactaatgtcaatcaggcttctccaggtgaggcagacccttccaagggctgtgaaatagctagtgggagctgctggccttttcaaagacatgccttcaaagcagtattgctttcttacttctgctaagacagatactaatagtaaatgtcccctatgtggggacatgattttgaacccttggtccacagctgatagggatttggaacctttgagacatagagcctccttgaatgaggtaggctgctagagtagcaggtttcaaggctatcccatctctgctctgctggagttctctgtttccggactgccatgggatgtatccatggatatatatggatacgcatccatatacatgcgtgcacatatactcacacaagcccaaacacacataaatagatgtctttagaagacaacaaaatccctcagggtgctggaggtagaaaggcatgttcagaataacgttcattcaccaggaagctaatgaggcttggccttcagcatcttttaggacagtctctcgctgtatctttcatatggtcatacacttatctgtaatgtcagacattctataccattttttttaagtgcctgagtctgcttaaccatcagatcctagaaatcggaggctcgaaggccctcggaggcaacttggcaactgttaaggaaggggccagtttctatgtgtcccacatattccaacacactgttcaagaagcagccaaggtacgaaagagtcaagagtcctttgagactaaagaaagcagaggtgtaatgaaatatccgaacaaagaacaacttctggctagaactggtggtctggaaccccagacatcaggagtaccggtcatcaaagtctctaagagcataaaaagggaccaggtgtacattaatacctcccgggatagcagtagcccttcagccttctaccaactctcacagagactcacaggtgggaagaacaaagatgcatgacaccaagatcattcttaaacaacagcttctacattaacccagacagcatcttggggaagatgatatgatggatgaccccatttggcccattgggtaagtggacattatactgaccgctatcaaagatgaagttaacccaagactgggaaactacctaccactgaaagcatttaagtttcaatggaaatgggttttaaaccaaattaaaatactttattttaaaaacaaaggtgtgtttgaaattgtgattctcttcatttgaaacattatgaatcaggaaaaaaatgttgttttttttttttttttttttaaatcctccaactaaacagactctctccaggattctgtgggaatttttggcatattccaattatagaataaaacctgtgtgcgatgaaactgtgtttgtcaggaaagcagcagtactgtttacatttatcctgcatatgctgaggtggagactgctaggtgttcatgaaaactttgcttgctcttctttgtcctctaggcaactgaggtggccccataaaggaggctcacacagcgggatataagtggaggtgtgtggaacaggtgagacacaaccatgggttcctatacccgtgcattatgctgtttctccatctcactgctcatgtggacaggggctcctccagcttggctactgataggggatgtccttctgtatatatgtttttttttattggttgataaataaaacactgtttggccaatagccaagagaggcaggaagatagatgggagtaggatgcaagaagaattctgggaaaggtaagcagagaggcgccggaaaaagatgccatgtaggctgccaaaggagtaacaggtccaggcattctccggtaagataagaccatgtggaaatacatagattagtagttatgggttaataattaagacagagctagccaataagaagccctagccatcagccaacagttttataattaatatagcatccgtgtgtttatttggggctgaagcagcagcgcgactaggcaggaaagaaaactccactgacaggctgcctgaagaatgccatggagaacaagggctctcacccagaaactgtccgtcaccttgggctttttaaatctgagaagtaactctgatttacgttttgggcctagaacctgtatctacactctaccgtatagtctgtttcactgtggcagccagtggtatgtaatagctgcatacacaagtgttaaattctagacccagctttaccaaccagccgggcaggaaatcagacaatgatggaggatgctgggaagctggggtggtgctgggatggagggcaagcaaaagaatgcaaaagcacactgggatgtgcgtttagtatttaccttctgaagtaaccaatgaattgagccttgaaggatgaggaaagttcaggggaggagggctgggaagctcgtgccagactaaacctgagttctctaacattttatccatgcagctgtgatgtgaagacagaaaacacattgttctgttctttccagggcatagaatcaaggccagggaggaactagagggaaagagaattctgtccaaagggaggaagaaccaatcatcaaggctgaccttgaacttcaggggcactgaagacaacggaagacggtgtgctgcctttgggggacagccagcgtcttggcatgggcacgagggagtgtgggctgagcatggattgtcacagcttcacacagccgccttccaactctgggattctatgcatcttccaggccttagtcgagtagtctttatacagtgttgccagcaaagggaagggcttcagctttgctggtgcatagcttactcggtagtacttgccagtctccgtctcaaggctacgctggctgtaccccacatgccaatcgccagcaacccagaacatctctacacacccaggcccctaaatttcatttgataacagcaaatacttactagccttatattaaagaggattgctcctggggtcagtaacatcaaaggacagttaaatgtccacttttttttttccaggtgcttaggtcaaggggttaggtatttttacttaatagcaagtagaccatacagaatatgaaatacgttttccaaaagactgccaataaggtacattccactaaagctgtataggaacaggttcattcctcttggatgacctgacacactgccaggcaccttaggaatcgaagccataaatatcagttcccatagaggaattagttctttagaacagacttgttttcggttctgaaatgtacctatggtggataaaacaggagacctactgcacacactctaagatgctctccaaacactacagggaaaccagttactttcacttttttaaagactatagttcatttccacaagcactcactaggtcgctttacacgtggagtactcagggatagagtaaatgacaaggtgctatcctaacacaaaggcttcccaagattcatgctgtcactcttcttaagagtaactcgctgggcgttggtggcgcacacctttaatcccagcactctggaggcagagcaggcggatctctgtgagttagaggccagcctggtctccagagcgagtgccaggataggctccaaagctatacagagaaaccctgtctcgaaaaaaaaaaaaaaaaaaaaaaaaaaaagagtaactcactgtgattataaaacaaaagataaattcggctaatctacagggttatttcgcctatcacatctggagattattcctatcgaaaaatcgatttgaaaacatgggcctagattattattctttcatctcctgtaataacactccaggtgattaatatattgcttaaataacgaaaaaggaaatctgattattcccaagatcagaaatgaatactaaacaaagccttacattatagaatgactcttaactatacaacttcaaccttaacatccaaacaaagggaattcacagagctgtggctcttgactgggtccacgtacaagttatattttatctgcagttgttcaaacataaatatgagtgatgccttcttagattcacattgcaaaatcccacagacaccatcttttcaaattcaggtcacatccctgccaatacacaacaccatgagagaatcatccctcaagtggtaccaagaccatctgccttagatatccaatctcacaacccttcccagttcctctctacccactcatgacccaggccttgaaatccttggctcacaaagctagggaattattttccctttgagaaaatggatggtgcccaaaactggcttctgttcagtttggtttttacccaaatgcacatactatttccagaacttgcttgctggccctgtctggaaagcatgtcccaggctgttctggccctgtcttggtaccaagtctgctcaaaagaatgggaaacaacagctaaacccttgaatgaaagaaccccactgactgtaacattcccacacatggctgctatgagcatgctgacatttttggggtcccaaaggaacagtgtgtgattttagtccttagtcaaaatgagaaattactactttctgaaagggaaaaaaaatccccacactttagaataacatattttctcccaaccatcattgattcgagcccaggtatcattgatgtttaaaacagataagtcacacagtcaatgcatgtcatggcagtcattcatacacatcaggtagccactgagtttgtacttctatcccaattgtcacccacactctctggccttcaatttgttcatcaaaaccaaatgctacaaaggaccttccatatctaaatgtgccagaaccacgaaaacaatgccgcccctgaactctctgtgtgcaggccacgtagagttaaatccacaattaaagaccatgaaacaaggggggacaattaaaaagatatctaaggccccctcgtccattttgagaaagtaaggcatggccagacaattgaccgtaaaacatgaatgtgtctcacagccctaataatacaatccttactccttatggccaattctcctctagcaacgaaaaaaaaccctccactctattttttccccaagcacggtctggaaacacagaatgaccacagcaccactaagacgaccttcaatgttcaggggcctaggccctgccaccagcaactcggccaccagcaaagaattccagtcaagtcatagaaaacactccagccatcgaatgagtgagtttaaaaagccacacctacccggagccactgcttctcggtgagggcgtcgctgtagtccacatcccggcgctggcgagaacccctaccaaatatcttctcctcctcttcttcacaggtaagcctttccacttccgcgtcatccttaataatccaggagggcagctcatcttcctccatcaggcgaggcttgcgctttgggtttctggcatcctccctcctccggtccatgtccatgcgctggggacagggataacagtgtcaccagagggaagaggactctgtgggacagaacttaaaatcttcagaagttgtcttcacaccacaggtgtatccctttctgcccttcttcttctagttcacttgctctagttcgtccttaaagcacactgtccacctgaacgacttccacatgtaagatctctttcttcctctatacccaccatttgaatttacttttgcattaaagaaaataccctctttaaggactcatcttcttagcctgtgtatatgcttgcaaaagtccacctcaagtaacagcgggaaaatccaagaggagaatgcattgtagaactgtgagccctgggcctctaagatgcctcagtgagtgaaggtgcttgcagccaagcctgacaagacgagttcagtctctgagacatacagggtggaaggaaagaatcaattccagcaagccgtcctttgacccccacacatgtgctatgacaagcaaaatagatgcatggggaataaaaatgaagggtgagcttccccccaaacaagtaaattcttggggcatgtacaaaaaagaaagtctactaaggatacgaaccttgagaaagagggtttgtgatttcaatggaacagggagaaacatttagggagagggtattagggacctgggtatcgcccactgttacatgtggaagggacgtacatgtttatactggtcagcatcaacttatcagtacacagtgggggcgggggtaggaaaggaacatactcctcaattcttcactttttatacgttcagctcttaggaaaatattacgatatcacagatgtcacctccaagtcagtctcttctcgactggccaagatacatgtgaaatggcttcgctttaaggccttggaagcctgttcctccacctctcactttctccttgaaaattctgtcttaagccaagtaaatgatgtgcccccccaaaaaaaatgtagcagaaaaatctggtataaagaacaaaagcaccactttccctctcttactctggttacatagatacagaccatccccacgatgaagtaagtcattaatcgttcattatttacctgttcttccttcctctggttctaccatacagaaacaaggagtcagtaaaacagttgttttttgtttgtttgtttgttttttcccttaaaagctgaaactgatagaatgtgaaggaaatatttgctacttggacccaaatgtgacttaaaaattaagggtcagccaggcctttgtggtgcacgcctttaatcccagcactcgggaggcagaggcaggtggatctctgtgagttcgaggccagcctggtctccagaacgagtgccaggatagactccaaagctatacagagaatccctgtctcaaaaatccaaataaataaataaataaatagaaaaattaagggtcaaagttctttaaactatgcctcaccattttttggaaatcattctgtctgcaggacggggtaagcttggggcatggtggcatcccattggcggataaatgtgactaccctgttctctcttgctatacttagcttgtgatgctagacttaatccagccatctaatgcctgactcagaaacagatctagccatggaagcttggcaacgagcaagaggtggctttctttaaggcaggatccagacagaggttgtatgaggcaaactcctaatagcgatcaggtaactagcaagaacaaaatctccccatgaactgccctgtgacaaaatgttgccacttcaagttctagctagacaattcctgattcctagactagagcttgtaaaatgaccacagtagactgacaactggagagtaagtcatctttttttattttactaaaaagtcacgtatgtgatttttttaaggtattaaataagataaggtgcaagtcctaatgattgtgtctctctctagagattctactcccacaatgcctctgtagcattttaagtcagtattggataaaaagactaactgttgattgaattactatctggatacatttgccttaaggccttattataaactttaacatttacaattatttttagcctttgaggcaaatatggcctgtggtttgaatattggctcaagatacatttctgaagcatgttgttatatcaaataaaatgtttaggtaaaactcacaggttatcagtataataggtgagttatttaatgtcttggttttagaaggaggaagcaagaccactgtttaaaagactgttattttaaagacactatttgtttatagcatctatacattaaaataagtcttcaatatgaatgtgaggcacagaaataactcttaaaaataaagaatttagatatcagagatccagagcctgggccagctcacattgcattgtttctcactaaactctttaatcatagtagctgacatggactcagatcctatttcctgccccctggtggaggtgctaatgaacagcgaagtggcaaaagctagagagctaagttttcaaaattaaaccaaacaaaaacctgtgtggctccctttccccaaatagatgctaatacttaagaaacaggcatgagaactcacaaagctaaggtgtctacaaaagaaaatttgtcccttagccagtgtggcccgttacaagcctgttcttcctgggacacgtactcattccctagtcagaggaagacccggccttggccacacttgtcattttcatctgaggttttcaatttctacaaaagtccagcctcaaagaagggaggagaggcaccgtttctccctgatctcagtgtcactagggactgtctatctctgagccaaatctaatttgggagtatctgaggccaaggcagtgctgggtcactgccagggaagcctctgcctgagggttccccagtcacctatatcttagtaagttcctctaagatagatggttattcctgatgtgtaccctagcctctctatttaaaaatttaatctgtaaatgcggacagtgaaagcagaaccccatgcatctgccctgtctctctaaaatggcttcacctgggcagggaagaaatccatttcctcagctagaagttattgccatggctgcctgcatttttctgagagttaatggtcttttattgggagtcattatgtatgggcacaatctgtgttctctagacaaaagccatccaaacaaacaaacaaatagcagccccccaccacacaaaagtgacacaagaatccactccatctcagctctattctccagccctcctaagctaaaaaggcagagattgcaaacctattgggtcatatttggcttagttctgttgtctttggcctgcaatgttacagaataatattagtaaaagtcctgaatttagttgcacactttaatgctgaggttgagtctatcaatgtggattcctagcttctcttcaaaacttgtgatttctggctaaatgggtctcacatctccaccttatagacccggcaccagtaatagaatctctaacacacccttcctcattgtgtcttactcatgcagggtgcattatccaagacctcagggcttcccaactggtgcctctgatcagggttctccagtgttcctacagcacagcgacgaggcatccgtattccattccctccacaatcaggctacatgccggagatgaagaacagaataactgcaagtattggagggagccttacactttaccatctggatctgtcctgccatcccaacaaagcctgaaactgcaaaactcaccactcattcaatgatctattatgtaacaactgcatgcccaggactgatctggccatttaagacagagtgtaagagcctgaagaaggcaggacccgccattctgcagctgctgagcaggctcccccacagttggggcttgttcctcaatcacttcggcatggaaatcaaattgatgatatatatcacggaacttcaccgtgaaagtcaatgacaatagattctaaaataccaaggttccttaatgggaagcaggttttgctctctgaaccacagccatatcttcctatgcacatacctcaaaggctgtactcgcttatgtatattccctgggacagttttaagggctgttgcctttcacctgctcctattgggaagaagctgactagggtacagttgcaagcagaatggtctgagaacagggtgttgtgcagtctgatgcttggctgggctcagaagtgggtccctgggaactgtggaccacatagtctgtccagagggtgaagctgtgactcagctctgccccctctcattttcctaaggaagccagaaatcaagattcttttcactctggcaacaaatgcaaaatcttaagaactgttatgtgggccaaacacaatatgtctgcaggctaaatccagccagtttgcatgcagactctgaatcaaaagaaacacacaggcttcagcaccaaggttccaccggctgcaggcatcctggataccagaaaagagggaaaagaggaaagcagttgtttcccatgattcctgcaacattaccataaaaagatcaaactcttcttcccggcgagcaatcatctggttcagggtctcgtcgtctggtacttcatcttcttcctgggttaaacacagaatggttgaacaggctttaagaacagagacggggagagagagagagagagagagagagagagagagagagagagagagagagagagtgtgtgtgtgtgtgtaggggggcattcggtcctgtttctctagacagaaagggaagggaaggaaagtgcccttcagtttagtacctgccattcctatgttgcgagcttttcaaactcttgagggcaggaaatctgtctagggaggggacatctgctctctaagaaacagcagccctcctgggtgtggatctttctgtaacttttaaagccagctacttaatgtctccccgcctccatgacctcatcggcaacataggcgtgacatctacttcacaggaggatgccagccttaactgcagaaatccacttaatgttaattctactaattcctgatgaacctgcaaatgtggatgttttcatattcaaaggtttacccaaaacaatgggttttgtcactaagtaccaggacaagggacaaaaaaaatcacacttaggtgaccaaatatagaaccttagagacatgttgaatcaatggttttcagtaggcgatattattgttggtggttaaaactacagtcaggacacaattaaaagctatcaatacaaaaataccacaaaactctacccaattaaaacaatctaatgaagtacaaaaagcaattacataaggcccaaaagttcctaaattttatattcagttaaacaaaggcacattatctgttaatttctcagaaaccaacagttctcaaggttttaggaactaaccctatgccgtggcttccatggttttaaaaaatcccagctgcttaagctagatgatatcagctcccaagacaccttgcccaatgcagggacttaataaatgaatacaactcaataaagtatatgattcaagacaataattactactgaaaacccttccaatttaattcagccccaagttgattaaagtcagtctgtctaaatattacatttcacatgatgaggaggcaggcagactagttagagagggggctcagcccttacaagatcatgtccctggctaaagcactagtgaacagaggtcttcacttgccttcactgcccctagaaccagctgtcttgccccctacacaacgaggccgtcggtgtccccaggcaagatgcagattctcctagaaattgccaagacacctgttcctagagcacaaattgtctgggaagtttacaagaactcttgctgtgttctttatactcatacttcgggccagctgtgatcatggcaccctgcgttgccctggactgttgggacagaagccattcattgcagtctgcaaaggtcccctgttggcttcacatcagggcatggaccgccagagcctggtaacagttgcctgacatagtcatagtcaggaagggatgtggagttccagtaggctgctaacatggcaagggaacacccctggaggccctacatgatgatctgcaggcctgagcgagatcagcctctcctggtggtttagaaagtctagaaaactccaggcttcatcgccaccatctcctctggtcaggtaacatctttacaaggtttttcaaaaagtacacaagaatgcagtggagactcctggctgggaaccagctctacccacatcatgctttgtccctgtgtatgtcatttaacatagtgggttgaatggttttattgtattattgtttgaaatatatttaatatttatcacattatttactcagtatttatttattatgggaatccatgtgctatggtgtgtgtgtgtgtgtgaggacatcaaaaagacaacttgtgggagtgagttgtctccttccaatatgtgggtcctgaggcccaaactcagtctggcaagcttggcggcaaacacctttacctgctgagccataatctcactagcccatggtgttttaggaaatgaccaaatgaataaacaaaaacaagaggcacctgacaatctaactcctaagtctgtatcaaatcttcaaataattatttgagatttaaaaaggctttcaatgtgtgagaatgtttgagtgtatatgaacaattttatttctcatcatttcctgaaattcaacaagtaactaatctgagatatagatatctcagataaattaggaggtacaatagcaaacactcttcactttgcaaaaagattcatttcagtattcttttacatatcagtctctacttcatatgtaggatcatttcagaaatgaagactgtataagaaagatttttaaatctttgcctcacgggccaacacccaaggcagtctcttcctagaaaactgctggccacactggccagggaaccaggtaaatagataagagttagaaaaaaaatcatcctcagtgaagtaacccagaccccaaaagacaaacatgtatttacttctacgtgaatgttagcttttaagcctttgataggcatgccataatccacacaaccacagatggtaggtacagaacaagggactagtggggagggatgtgtcttcctaggaaggagaaacaaaattaattatggatcaatgggggcagagacaggaacagagggatcagatggatatggaaagaaaaaaggggtgagggagggaatatagggagtgacatctaaaactaagggccatttgggacattatatggaaactctaaagcacatacatatatgaaggtgatctaaatggaatcgccaagtaacagggggagaagaagtccctatgtggacatctctcgtcaccaaatgaggagtccagtactgggaatgggttacatctaattgagttgttggccaaaggggccctatgggaaccttcaaacacccagaatatttccaagactatcaggtgccctctccaaactgatattgctgaagacagtatctacacaactcagtgaacatggagaagtcaagctgaggacacctaccgagaaccttctcctttactgatgagtgttcagggtcctggaagacactctgcatgctatactaaagcagaaaggtaaacacaaacccagctacaaacccttccatccacaatggtgacatgtatgcaagatgtcacaaagtctgtgggactaactaatcaacatctgactgaatttaaggcccactccatgagatgggacctatccccaacactgattgggtggtcaagaacctgagactaacaggccagggagcttaggggaaaagaaaacactactgctctgctaaaaaaaaaaaaaaaaaaaaaaagcaacaaaagactccaaagacatcctgctacactcatagaccagtgtcttgctcagccatcatcagagaagcttattcctgctatacagacaggaatatagagacccacagacaatgtgcagagagtgagagatcttgaaacactgggtcctaagtgggatgtctccatcaattcccttccctcaaggttcagggaaccctgtagaagaggagcttctgtagaaagactatgaggcagagggaatggaggacaccatggaaacaaggccttctaaacatagcaggaatggcacacatagtgaactcacagagaatacagcagcatgagcagggcctgtacaggtctgggcctgagtagattccagttctgagagtcgaagtagacaaagacccacatctctaacacagataacctgataactactcacaaataagagagcaagagtcgatgtgaatttgggtgggtgggcagctggggacaatctagggggaactggaggaggggggggaccataattagaaaacatataaattatctattttaatgaaaataaaacaaaaaagacctttaaaagaatttaatatttaatttatagaggacttaaaaaacacaaaaccaaactacatatatgtaatgagaatagtattctgtataagtatgttaagtaaacttaatgctctaacttttgagcacaggtacacaaaagcaaatgcattcatccctaaatagcttcacgataatagacaatatatgttcttagatgaacttgaaggtcattttaggatgataatctgtgtctctgtgtgtatctgtgtataaaagggcctcacacaagcaagaaggtattctagcacaagagctgcacttagctatagttagcataaaatgactgaaactggtcatctaaaaagaacaaaacgactccataaaagacatataatcaaaacatcatttgcacaactttggcaatttttgtaaatagagacttcaggactcagatgatttatctcccccctcggctcagttcttaaaagatcctttttgtgaaggttaaggtcaagctttccaagctcatgagccaaatatgttgtgaagaaccgtcctataagtgacccttccctgattaagaaaagcaacagagtcaggggctttggagtaggagaggaagaaaaataaagaggtaggacctagactgcaatctgagttctacaaagtaaattcctgcagttccacaggctacctgtaggaggcagaactcacaatacaataaaacatacttggtgcacccaacccccaagaggacagggaagtacatcccattagctaagcttagaatcttttggcaatagttcttaagacactcctatgaataacttttagaggttttctgtgtttggggtataagatagcagctaatttagtcattttaattaacatcagccccaaaaattctttaaggaacaaagacgttattttcaatcccttcgagacaaaaggtcactgttagatttcagaaactcaggtctctgtaatacctcattctcctcttcatgctccaatatggcctgcaggaatgctctccgctcgtggctggaggacttctgatcaaacatgcccgcctggataaccttctggtccacattcagcttgtactttgcagctgcgagaatcttttcctccacactgttgacagtgcagagcctcagaacccggacttcattctgttggccaatgcggtgagctcgatcttgggcctgcagatcctgtttttgagaacaatatgctatgaggatccaggcatctggattaaccccacaaaaagggctacctaagaggaaaatgtgggcaggttccataaccagcctttacaaaggctagatttttgcttatatttaaaaaacaacaacatcaacaacaaaaaaatacacaaaaaaacccaccaccaacacacacatacacacactcacacacacactactgtctttaaattaaccatgtgaaataatatctcaggatctgaaacctagctctagaaacagtttatctacctgtaggtttgccatgacaattagtccttcactgaaacaaaaaccagtataactgatgccagaattaagatctagattatgaccttacaaaaaaattttcaaggaggaagacacatagtctcttcattgcaatgtgttaatgacactattacctcgatgaactgtattttcatgtattgtatatacatacatatatacatgtacatcttattatacatacatacctacatacattcatcaatgcattatacaggtagtgactgaccagctaccccattcctggacctagccctatcacagggtcagtaggtcatctcacatcctagtacatcctagtatatctggaaatgcaggtgattgctagtaggataataaagtggagaattgggggaggagggagtggggggggaattggcacagatgccaagatgtaaatattgggtatggttctgcctcaggattcatttttggaagtttatcctgaagaaactaccatgggtatacatgaaaatgggctttttttttttttttaaacaatacctattctttctgtatttttttcaaatgaggaagcaaacaatcaactgttccagattaccgaagactgtagtatgcaccagcagagacacagattatcgtgagactcggggacacagctgtaggtggggactagaagttgtgaacgagcatgcacttgtgtcccaagtgtgcccatctacccgtgccactaaaaccgtggcagcatcaaacactagtatgccaccagtgttcacacagcccactagaggctttgattttaacagtctgcattttgtttacacatatcttaacagtttcttctactttaaacgtcttaatcgtatcagatgacaaaggttttaatgaaatctttaagtaaaaactttcatgaacttctgaagccgtcacctaactacagctacccaaatcaaaaatgttttggcgtggcccctttaatcacatggtccaggcgagggaccgggtctgtcgcccatcacttgtttacacacatgtcattagtctgggcatgtttttaggacaaaggtctgatgagatcaatccatagtccataaggctaagatttctttattcagataaacaccagcccaaacgcaagccagagcgtgccatgggcagcaaggcagccaggcccgagagagaatggccagaaagaaaggctattctcgtgtgcgttatcccttaagaatcgttcccacgtcaccttagacctctcctgaccacgccctcatgggcgtgtcccggcacacctgtccgggctactaggaggcggggctacagtgtccccctacaaaggtctatgctctgtttcttgcattcctagcactacactttgaacatggctaaccctcagctataagcttgtctttccaaccagcccaggttcctgccatctgtgcaacacaagggggcagtggacgaaagtgtgcccaggagacttgttcatgctgcagggacctttgaaactgggcaactaattaggtagaagtttgtcctcagaagctatgcgaacaaattcatgtaaacatcttgtgctggaccacgagcacagtggggattagataatcagattattgtctaaaaaggacagtgtaaaataggtaattaaaattctttcctgtggagggcttgagccagtcaccacttccaacgcgtcttcactagtacactgaaacgacagccaatgacaggccctgtgtcatcaacctttccattggaactaaggtgagccaatcatttccgtcacagggattcttgtagacacctgggctatctgagctggaagcagaaactgttctctctaaagggactagttagtcccttcacccaactgccagcttcatatttctgctccaaacatgaaaactagtctcctctttcagctggaagcagaccaggcttgcccagaaggagtactcttacaccaggcttgcccagaagaggtaatattctgccctctgtgtaaaagaggccaataaaaccacaacactaaaatgcaggtggcagcaaatgacagggacaatagagagacagggtggaaagtccaagagtccttggaacttattgaaacagttttggtggctgagccagtgctttgggtttgtgtgtctacatcacctgtctgtttggaaagtagccacagttggcatttctaatttctaggatgaaggtaagttcctaagtcaaaaataagtgctgtaattattgggtgggttaattatttctgagatttctctatatatctttattttacttttgagtttttattgttgttagttcatttgtttggggcagtgctggagattaaatccccaccctcatacataatattttaggtgaactatatttctatattttcaagccctgtttttacatcccaccactcccaccccactagacagggtttctatcctggaattatctttgtaggccaggctggcctcaaactcagagatccacctccccctgtctccagagtactggaattaaaggctggcagctttctccccctatcccctacccagcttgcttttactttttgagacaaagtatcactaaattgtccaggctggccctgaagtcaacccattacctaaaactggatgaattcccatcttcctgcttctgcctccctcacagctgacattacagacctgtgccacaaagtcctgtttatatctgagttttcaatctcaaacttcatggccctcatttatgtgtgatgatgtgtggtggtctgaatgaaaatgtcccccattggctcatagggagtggcattattaggagctgtgtccttgttggaggaaatgagtcactgggggatggtcttgacatttcagaagcacaagccaggcccagggtggcttgctctccctgctgctttcagatctggatgtagaactcttagcttcctctccagcaccatgtctgctatgtgcggccatgcttcctgccatgacgacagtggaatgaacctctaaactgtaagtgagtcccaattaagtgttttcctttatatgaattgctgtggtcatggtgtctcttcacatcaaaagaacactaagacatgatacctgaactcaagagcagagctaggaagagggcccctctagagactttatggttgatcattttgtcatttagccatgggacttgcagttaaaaatggaaatccaaacccgtgtttctcatcaacagtttgaagggtctggtaagtgcaggatttcattggtaattccaaatttatgcattcttcctttacttccaggtaggtcagacagtgaaagcaaagaggtaggaagaaaaccacagatctgtcaccctgacaggaaccctgcctgaactgcagaatgcaaccagggacactgtaacaaatacataaaaagtgtttctgaacttgaagcaagcagaataggctggcagctcccacccttagtgctgtttcaatcttgtcatccacagacaatgcctgagatcaagttcaatacagaggtatccgggctcactgaatgagatacctgggggtggggcaacagccagtaggaggcaggtctgtgtttctttaagacttgtctttgaattctaatgtacccctgtacttgcttccagacagcagcactttctggaagtccctaccactggatctctccagtcaccaggtgatgggcatgttatagctgaggatggccaattgctgaggagcctgggtgagaagcacacggttcttgttcacatgtcagaagtgcagttcccccttttagcagctggaatccagggttggttacaccatgaataaaatcatgttggcatctacccagtatcttataggcaaatgccccatgtcctagggttgttaggaaacctgtggcatagaagatctagccaacttattggccaacaaatactctcaataggttattcttttcttgtggtttaaagtggcatacaagatagaaggttaactatcctttgcaaactgtccttgaagaagttatgtaactcacctggaactcagtctccttaatggcaaaaatgtaaatagtaacattcatgccctttcagggtgattgtgaaaactgggtgaaaccaggcacactaggaggctggtgccgagagaatgctcagtgggggctagctgttgtgttcttcaatttgtttctacaattactggtcctggaggttgacagcagagcctcataaaaactaaacccatagtctgccactgaactccacccccagcccctggaacatttttgatttatccttcaccagatgcaatttgctcaatggcaatcccaagagatggtattaagacagaagaaagtttgagttttccaacccactcttgggctcttggcaggcttgggtataacacagaaatagctatgctccaagggagataagaaaacagccataataattggctgggctatttctcctttggagaaattgcccggtcatttagaaatgtgctctgtcctataaatgtgagtgatgaaactgataatctttcccttcctctccagagggaaagccttggcgcccaagtagatatgcacacctgatgaggattccagtcgctgtcaaagatgaccactgtgtccgcagcctgaagatttaagcccaggcccccagctcgtgtactcagcaagaaaatgaaatactgggacccaggttcattgaatttcttcagcaaagcagcccgatcttcagacttggtggtgcctgaggggataagaaaaataaatttgccaattaacttctgtccggaaaaggcagagacaaaaatgcctgctttcttgaaagatacatccacagtcttcttaagcactggtgaggtaattcttggggtttatatagttttggaaggaaattaaagcattttgcaattagaaaaaaaaaaaaggaaggaaaggaagagagtgtttatacatttctgaccagaaacctttgcaacttcacaaattctagaaaattcttactctaagatgtaatgaaaacatccaagtgaaggactgttgccattctgaaggcttgaagccacaatatctaaaagtgaacctccgtgctgctcaggctaagttgctgctctttgggttaaaagatactaaaccagggggttaccctcttcaaggagcagatgggaggtagggcgggagcaatgggggtggggtgggaggagaggagggagggggaatgcgtattagaatgtaaaaaataaatattttcttttctgacctggtagacaatgagttttttttaattcttttttatttgaattagaaacaagattgttttacatgacaatcccagttcccttctccctcccgtcctcccctaccacctccccaatggctcagccgttaaaggctaggctcacaaccaaaaatataaaaaataaatatttttaaaaaagatcctagcactgcaaaaaataaatataagacgacaaaaaaaaaagatgctaaacaaacaccaatgaaccaagcagacggttagattccagggcggtcatagcagggagtgttgaagagtacaggcttcagcagagatcactgatccccaagtgtggtgctcacttgtggacacacctgtgagctcacttgtggagctcacttatgctccactctagccatctggaacgtatttatccagcctcttcataaaatgcaccgtggaagggacagcgctaaacttcaccagtatcccacctgaatgtattttgttagggaagctggattctgaacaggctgatggggaaaagctaagcatgttacatgatactccctggctggccactggacaaatgttgcccctctgagttgttctttttttaggatgaaaatataccacgatttatgtcagaggattaaaacatttaactgacgccagccaaaggaatcaagttactcactagggccaagtcccaaacacggaggatctggtttctacattttgtagaaataatgagcattctcgggggggacgagaatcaatcccccaaatatagcaagtggagattaggagcgggtgggaggggtggggagctttcctcctgtaacaaagcaatgttcttcagactagtcttactttctaaattagaattttttattttggtttggtgagctgctcaaatccttccagagggaactgaaggaatctggacttgggggaggggtggcttattgagtagggtctgaaacttgcaaatcttttttttttgtttttgttttttcttttttcacaaccggcttgctgatattagagcaaaccatttgtccatgacaataatgaagggaagacatgttttgttttgcaggcaaccttccctatactgactttccagttacagtcttccacacagaaagaaaatctctgatgcccatctcacagttttaggggcccctgtctattattaattggcaagtttattatgtgcccttataaaacagcatcatgaccgaagggtgtatatggctacctagtgactaggacacaaaaaagcctaagggagggactggggccgaacacttccttgaaagctgtgtccccagggacccagtgacttcccactaggccctacccttataggttcaatcacatcccagtaaagacatttctggggaacaaacatttaacaaaaaggaatgggggggctaaaaatctaactagagctcttatcccccccccataagtgagaattctttatgaaaaccacacccaccctttagctagggagggatagtggggattgaacctaggacctgtacatgttaggtaagcactccatttataacctacgacaagtcctgaagaactccctaaccctatacttgatctcctacacagggttcagtttgagcagagtttaacattgtaagcttgttccggtatgttgtatgtcttgaaatatacttgtatgtaggtaatgccagttgcaacattagattacttccaaggaatcatcaccaacatgtttgtcctctgccttaaccggaaaacaaacaaacaaacaaaatacttctaaaatggggaagggagaaataatgccatgggttccttagcagccaggaacagaaacttgtgcttggatactctgaggcttcaaccttcaacatttttaatcattgaaaaatgatctggtcttaagatatgaatagaaccacctgggaaacatgcctacctaggatgaaataacctccagtgtaaaacagagcaccgaaaaatagcagtgtcaaaatgctttagtcaaagcagtccttgggctctccaccagagagctcaggcaaacagaccaagcatgtgtcttccaagggttccaagggcttaaactgcaaaaaacagctggagatttgacagattataaaaataaattaaaaaaacattcaatcgctttccatgtgaagccacagtacttcctacgaggagactcagaatttcctggcttgtcacctccatccggagacaccagcacaaggtcactgctgctcacttgcaacctcttcagtattgctaggggagtctcaaactgccctgcaaggggtcatccaaagacaagtgctccttgcccactgcaggtgcttgggatttaaagtgctcgtcggccccagcatctatttcaaggtgtatgagacatgacccttacaggaacacaattaacagcaaggggcaactgtgttgacaactacagaatttgccggaaggaacacattgccaggctgtcatgcctgctaatttctcactgcgttttggctgtcttaggaaagttctgtcttctggatgaaacttcaccatttgcactcacaaaggaaaagaaaaatcatttcccatgacaacaaaacaataggacagtagctaaacctatctgtgcaatcacagtctttgaagaaaaatatttgcttagcttttagaaagagattttttttcctcctgaagccaaagttgagatgtcaaattcagtaatgataatctgaagagcttttatgacctggatgatagggcagtgtggggagcatctggaagggtaaataataccatagccatgtgtacagcactctccacttccacaatgaggggctgcagtttgtaatggggaaagcctgtctaggcaccacggcccctacatgacactgttgcacaactccatctctcctgaaagcagaacagcaagctgcctaggtgtcttgtttccctcgctctcagctgtgtggccaagtttagaatccttaggatgctgctgatggacaagctagctgtccttcaaaggtggtggtacttccctggacgtgctcaaaccaagcatttttggaactagataatccacattagaagttggtttcacagctcagccttgtgttcgattcttctaaatggagattgtactgacaggcacaaaagacaatttgttgagaacattaacaatgcccatgaagtgtttttccttttgttctgcatgcaaccttacattaactgttaaggttattaatatacataacaataagaacaaccaaatagttgaataggtaagcaaacaggagactggaaaatcactatttaccacttttagatgtttctgttgctgttaaatgttgtatgtgtgcactttgcatacacacacacacacacacaagtatatctcacatttgtgcagtgctcatggaggccagaagagggcactggaatccttggcactagagttacagatggttgcaaactgctgtgtgggtgctgggaactcaacccagcaagtgcttataattgttgagccatctttctaggccttcttcagttgtatagattcaaaccttcccagggtagggtactcacatggagattcaaaaggaagtagcaacagcattaggcagatacctcagggtggctagcaacttagagctgggggagtgaggggggattaaacctgtctgctttacctgagccattacaggagacgcccacagtgggagagagggcaccactccaagaggaaaaaaaatccactcagatttgatgaaagagagatagagatagataataagagtatctagagacacacattcatgctgacttaagcattcatcagttggcaactttggagatgaaggataaaggggctttagattgagtgtctgatgacacaactaactttaaataagactaaaaagtttatgttaacttagtaagaccccaagaggtaggccatacagaaaatgaacctaaagactcaagttagaaaacatttgctaagtgtgctttatttatttctaattaaccacgtatgtgtgtgtgtggggggggcatcagaattaaaatagcccaaaaccttctaaggttatatacattttaatttcctactcgattaacaatgacattacactgcatcagataaaaatggttattaggaggctgggttctctgcacccagagtcacatgcctcttgcatatatacctgctctaatccctacataccacttattttgtttgtttgttttgtgttttgcgtttgttttttttttttttttccaagaaagggtttctctgtgtaacagccctagccttcctggaactctctttgtagcccagggtggccttgaacttatagagacccacctgtctctgtctcctgagtgctgggattaaagctgtacactaccaggaccagtccaatttcatccttgaatttaggtaacttctttaaatagcttgtgtgcttgttactttatgtcgacttgatacaagctagaggtttttgggaagagagaacctcaattgagaaaatgccaattccagaatggcctgtggtaagcctgtgaggcattttcttggttgatgagttatgggcagagccaacttgagtaagtgatcctgagatgtacaagaaagcaaagttagcaagccagtcaggagtgttcctccatgtgtgacctggaagctagaagatgaaataaacccaatcctcttcaagttgctttttgtcagaggcaatttgtcacagcaatggaaaccctaattaggacagtttgcagaatccaggtagctatgaagttttatctcttaataatgtggcttgtacctatagactatttagagacagaggcctcaatggcaaactcagaaatgaaccattagactgttactgaatagagaagacatacagtgtatcctttaaaatatgtcaaaggtttgtcagcatacttcatggctcatacagttgggactaaggagttaagctcttctgctctgtccaattgtacttacacagggttctgactctgtgttggtgtctatgagagataaacaagtgtgcaaatcatgtcatgatgtgaagggcatcagaagacataaactttgcatctagcagacccacaaccagccctcaggcccacttcttggtgttattcctcctttttggctgagaccatagttcaggagtcacggcctcttcgctttcaatactgtgatttgagtctgacgcctcccgcacttaccatcaaggcgcaggtaaaggaagttccgaaaagcaaagtaatcctccatgatggtcatgagagacgtcatctggcagaaaagcagcacgcggtggttagttgctctcaatttgggcagaatacgatcaagtagctcaaactttcctgaggcccgatacagctcagccctgaacccaaaaatgcaaaacaagaaggcagtattactgctgtcttcttgagagatccagaagtgcttagctttgcagatagagccttgcacatagtaaacattcaataaggaactgtggatggaagggtgaatgaacaaacggataccaggtccaaagccatgcatgcatttagagggaaaaaagtgccacccgtacaaaacccatgaagggtatggtgtgcatgatacatatgtgacatgtgccaggaaaaaaaaagggggaactttccatagctctaagattattcatggtgtgccattaagttaatttaagacagtcatgattcatttaaatacttattgagtaccgctgggtaccaacacgatgtgggcaggcatgcagtgataaactgtgtcactatacattggggtcaggaatataaagacaatcagcaagtgacaacgagatcactcggagtgtgcaaagccctgtcaggtccttccagaaatgaagtcttaacaaagaaagcacagccaggcccatgcatttctgtttgtctgattccatcctacactagccatgtcaataggtacggcagactttacggctcacaaaggtgaaaatatttcctattatgcctctaccgatacagcatgcccagcactgacttggagtatgtgaggtcagtgacttccctggagagagaacactttagctaaaccctgaaataatgagtgtaaagatatctaagtgagaagtgagggcatgcacatagagaggagactgtagggaaaggaagatgcataggcccagggagtacaggagcctggtatgcctcacgaatcaggaccaagcaatggtgaatgtaacgtaatgcataagtgacaaatgcacttgaggacaaatctgggaggtggggagacagcaggtactggggagtcctttgcagactcctctggttttcaatgcaatgggcaacgactgatgtgttggaaacaggaatatgaccctgagtaacctgcttcacagggttgccatgggcatctgtatgagagaggactcggaagaggtcctggcttactgcaggcgtgccaggcaaaatgtgatgggggaagagagacgatgctacggaaagtaggaaggctgaagtaggaccttccttcctgataaaccttttgttttgaaatcaacaggactgtgttgtgtaatactaaaatttactttgagggttgaaactgtttgaagcagtcacccatgcacacccagtcaacaacactgaaaatgtaacgctaggtggcagaatttacgccatggtacattttgttcctaaaggatcggtcttcacatttatcttcctgtctgcccatcacttattctgagacctgtcccttgagagtcatgttcccctgtacctctggccatgctggcagaagcaggagtggcctcaagacccagaggacaattgaagtgctaactggccctaatcccagtgggatccagttcctattgaccctgcctgaccctgggattcaacaaggacacacacaccctaataatttatttctcatggggtgaggcacaacacattttgtgtggggtgtgcttcattgtttctctgctgcaaggtgtgtctctgtcctatgttcatgttaacaacaaaaaaatccatcttagatcatactccagaaattgacttgaaacggatcgtctacttatggcagatgaggcattttctttcatgcatgtgaatgctaaccatccacagtaaattagtaggggaaaaaaacctctccaagcccaagttacattttaggttagcggtcaccccgcactcagagactggaacaatgtttttagaatgtgaaagcactggtaagtctcttaaatgagatctatgtcctttgagtagacatttgcttagggcaacctgaaactgatgcttggaaactacaagggaatgctgctctcattttgcctagcaacttctgtccctctgcaggggagcaaggagggctaaggaggctggatgctacagaaagaggttagataaggccaaaagcaatgcatcttgaaagggggggcgaaataaaaaaggatttacccattgatgaccccatttgaatagcccaggtgttcagcaaaggattccttgaaaagagagaagaatgtgactttaatatgcaatcgttaactttttggtttctctagtatgtctaaagctcagtcaaagcaaatcaaacgatccccagagagcgaatcagaaactcaggtctctgaggtccctttctgttccattggagagtgcctgagcatgccttggctaggagctgaacctggagctctttctggggaatccacccacaagtccaagtaaaagacagagtttaatgcaagcccatcacaactatcgtgtaagcgtaaacataacacagcaacagcaagcaatagaaataatagccattatataacattcactgactccctctcaggcctcccttttctctttacaaataaagccctaaccatactagaccagtggttctcaaccttcctaacactgcaacccttttaatacagttccacacataggctgggagttttagaccagtgtaggccacacagagagacccctgctcaaaataaaacatggttttcatttctcaggtttgaaggtcctaagagagataactccagtctcaaaactgggggttgtggaattatctggtatctctacccggtgtgtggaacacaaagcagaaaattggcaaacatgcacagcatcttgagcctataatagccagagtctgtggtagtttcaatgtaattggcccctataatctggcactgaaggtggaaaacagaaagctggtgaagatgtaattgaacaagggggccatgttccagccccagaacacagcagaacttggcagctccagctatgtggttctggctttagagttaaggatagaagaaatgggttatggaaattgcctccatgcctaaggaataccgctgtggacaggcatgtgtcagggtgtccctgaatggaggcctagtagagaggccatgtgtgaagtcgtgatgctgaagagctatggaatacctgctgaggagagctgctaagagggagtggaaccagcccaagagaaagaagtgtgttgccatcaacaaagctgaacagagttggagatctgaatagcttcttgacatcagacatggagatgcagactttggagtttgcccagctggtttttggtcttgctttggtccagtatttcctcactatgtccccttccctgaattttgaaatggtaacgtatatcctgtgctattatatattggaagcatatgatctgctttttgatttttacaggggagttacagttaagggattgccatgcgtctcagaagatactttggacttcaaaacaagtttgaggctgttatagactatggggacttttggagttggactgaatgcatttttttgcattatgatataactataagcctttaggggccagggagtggaatgtggtggtttgaaagaaaatgacccccaaagggaatgacactatgaggaggcatggccttgttgaaggaagtatgtcattgttggggtgtgctttgaggtctcttttgctcaagcttccctcagtgtgacagttgacttcttgtgaatttcagtcaagatgtagccagcacaacatctgcctgcatgctgccatgttcccatcatgatgataatggactgaacctctgaatctttaagcaagcccttccaatgaaatgttttctattcctttataagagttgctgtggtcatggtgtctcttcacattaataaaaccctaactaagacagagtcagtgacaactgcaggctctggtttctaggaccgtcctcgaaactgttgtataaacaagtacccatgcagtgtgtctgtctattcacagacagccatttaaagtgcaaacaagcaggcaatggagaacatctgcccagaacctccccacactactcttcttcttggagctccagatacccagagagataaattccccttccttcccaaatggccctacatgaaggaagaatgacatgctatttcataattgctaagacaccacagttctttataggaaagaataatatctcaaaactgctttaggaataggagggtaggtgaaaagttaaccacaatgtaagcattgcaccattagaaattgtttcttgctgggcgttggtggcgcttgcctttaatcccagcacccgggaggcagaggcaggtggatctctgtgagttcgaggccagcctggtctccagagcaagtgctaggataggcttcaaagctacacagagaaaccctgtctcgaaaaaccaaaaaaaaaaaagaaagaaagaaagaaagaaagaaagaaattatttcttatgctgccctgctccctatcccagtacactaccttccatctacttaatgtgatttttttaatgagctacttcgtgtattctaacctttgtgttgactcaaaaggttggagagaaggccctctcagttcagagtactggttgctcttccagaggacccaggttctattcccagcacccacttggcagctcacaaacatctgtatctccagttccaggggatccaacaccctcttcttgcttccaggaccaccaggcacataagtaatgcacagacaggcatgcaggaaaaacactcatatacatattttttttggggggggtttgagacagggtttctctgtggttttagaggctgtcctggaactagctcttgtagaccaggatggtcttgaactcacagagatccgactgcctctgcctcccaagtgctgggattaaaggcgtgcaaaaaaaaattaattttcaaagttgatccacccaccagacctagaatctctttctctcagtacaaaggcaggagacagcttagagggtcaagacttgccccacccagtcacagtgacaaagcagcctgagagaggatctcaccattgcaataatggattgtccttcatctgaatatctaaacagctacagcttgtcagtagaacttttaaaagtgttcacagagttcaaattttgttcagatctataaacacatcccctccttatcctggagctctgtctcaactatgctgtgtaacgcttgatggacatggtctcctgtatctagacaccctgctattgcatatggacactctgttatttctagggatattgtcccttatgtccataaatactctcatctgcatccccacatgttctctgtcctctctgtcacatactcaccccggcatccatgtcatagctagagttaatattgctgtgatgaaacaccatgaccaatagcaacttggggaacagagaatttatttggcttacatatcctgaatcacaatccattgagggaaggcaagacaagaactcgaacagggaaggaacctggaggcaggagtgcatacagaagccatggaggggtgatgcttactggcctgctcttcatggctttatcaacctgctttcttatagtagttgggaccaccagcccaggaatgtctccacacacaatacactggaccctctcccatcaatcgttaattaggaaaatgtactacaggcttgcctataaccagatattcaagaggcatttttctcaatggaggatccttcctgtcagatgactacagctgtgacaagttgacataaaactagcaacacagtctaaaagtactctatctagcaagcagatactcccatgtctatgggtactctctctgaatgtatggatattctcccttctgtcatatccctcctaaggtcaacagttcccttatgtatgctctccctgtctatgaatgctatccctgtatctcaggatgttacccctgggatcatggatgtactccttacaagtatgcataccctcctctgtcctcggatctctatccatagatatctctaacaacagaagtcctcctggtatctacagagggtcttctatatatcagaactctacccctgtgatcaaagatgctctcctaatgtttttggatgttctccttttgttcacagatgctctgtgtctatggacagttccctttgtccttggatgatctccttgtgtctatggacactctccctccatccatagatgttcacctatatgtgtggatgatctcactctgcccataggaagatgctcttcctatgtccttggacactctatatacaaaatgctttctcatacatccacagacactctctgatccatgtaaggatcttcttccttccctgtggattctccctcttatatctacagaagcgctttcctaaggacttgaagaccatagtggtgccaggatgggcctgtaatatggggaggggtagtaagaaagtttcaactgatccaacatgcatgaatgccaaaataggctggaatggggtgacaggaatactcaaagctaagaatatttcagctcattttgtcctgcaaatcaggacagcttttattgtctggaaggttctgtcaattgtttaaatagactatagccctacagcgcttttcctcttggccttttctcttgtttagtttatagtaggcagtggcccttgtgatatcaactgtcttaggcccatgtggttctgcagatggtgaaggtggcttcttgatacttctgctgaagccaactgctccactagactgaaacttgtcaatgaaggaatttcattcacatggagcagagaaaaaaatgtcctatgatctataaacagtgttctagagaccttagcatcagagcaaagcaacaatccacatcatcatgatagaaaacaggcaggaaaaaaatatcaatctattccataggctaaagccagcatctctcacaagcataatatttcaagaacatcattctcttcaatatctataaacacattatttaagtatttctcccagcacccttcagaggaagctggctgcatctgtcattatcttcaatttcagagctccaacagtaacaaggtaattcacagcatttacccaaatccacataatgagccggcgctcccaacatttcctcactactttaaactcttagttataaaatttcagctgctcaggcagtcagtgccaaagtgcatccacacctaggaaacaggtctattaattctaccagaaaagctgaaccatgccggctggacagccccacatatgtggtacacatatttgggggtttgcctttctaaataaatacaagatatagactcacctcaatgtgctggaacatatatgggtggttgcaaatttttctcagctgcatgatagtgttcataagcgtcttggcacctcctttcccctgagcaaaaagtacaatgaaaagaatggaattaattattcattgatcaagtattttcaagcttttaaaaactaggcttcaagaccaaggctgtagctcactggtagagcctgtgcccagcttatgaaaggtctgagtacaagtctagcattgaagaaagagagagggggtgggggaggaaaggactgacagactgactaacgtatagaaagaacacagtgtcctacctcattttagtacctacacaccttgaacccagagttcagggtgtcatttagacatctctggatcagacatagtgttgcccttgtgattaacttatcctacagaaaagtaaatcttacaaaatcaattcaagatgatggctttgtgtcagtactgtccataggtgttgcagaatatttgttaacactataaagatgtgtctctggctaaggtacttctgattggtttaagaaagagctaaatggccaatagctaagcaggagagataggcgggactgccaggcaaagaggaaccctgaaatacatttaggcagaggagagaaaccagccagatgcagaatgggacagagtttaaccatgctgtagaatgtagatgaataaaaatatggactaatttaagttgtgagagctagttgaaaacaagcctaggtgaaagaattaatcataagtctctgtgtcactatttgggagcttggctggtgggacaaagaaagactcataggattatacataggattctggtagaccatgcacaaaggatgctaaggagagaaactggactttaaaatgtcctaaaataccacccaacactgggcaccttgaattttctgctgagctatcatgagtggttaagtctttgataacagaaacactagcggggcacagacccgcttttgtcccactccaatgtagttaacagggtaatgatggcactggcagctactgctgccatcccaaagatccagtgctttccaggaacaagccactgttcacaggaaggcttcctggaaatgctcaaggctgcagccaggagaagatgagaagacattctgcaatacttgagtctcccggcctttgcaacataccttcttatctttttcagaaccgtcagtgaggaggatccccttggcctgcatatgacgatacagaatcttctgcagagctgacatgtcgcacttgatcacatactcaacctggggacagagcaggatatggataagcacaggaaagcaagtggctgcttgaagaaggcagtggagaaggggctgctggggccagtcctggaagcacatctgattccccttccaggattcaggcagagctaggacagggccacagagcagaccagagtccccagggtcaaaagaaccatgacaatgctaagtcctttataaggctgcatgtagaaaatgtaaggtgccgattcctaaaatttcttgatctcatatttgagacagggagtggcttgccaactgtgctatataaaaatgttccttacagtgaatttttaatattactcctgcttcttgatcctgtatacttccttatgagctcaagagaaaacaagtgactgcccccagatcctatttttttttttttttttggtaaaacatctttaactggctacatgccaccacaccagcagtcatctggtagtaagatttataacagacctaggttgactgtcattaacctctactctggggaaatgataggatataccactgtgaagataagaggttaagaagaattaactcacagcaggacacaacttctacaacctcatagctgtctgaagcaggacagggtcccctgtgtgttcagttttgataaaacaaagtgcaacttaaaaggattcacacgcccacagtctatcacacacttgcaagcctttagcatcctccgagtgcagacaacaagatgtacttctatggccattctcccttagtcacaggaatataaacacacacatttcaaagcaaatgccagatgaccacctggatatctaagaatgtgactaaaggaaatcggccaactgcctggtgtctaatcagctgtgtacaaatgtcttcagctgtgagggccagagagagaaggtcacagatgaagagaagcttaaaattcactcagctgtaacttaaaaggagcccaaggcctggcaggcacacctgggtgtctctttacactaggcaactacaggaaggaaggcttacttttttgcatgaaagttagctaaatggggtaacccatcaggccagttaataacctttcaggtaagagcggaaacacaaattttttaaatttatcaagtcagtacacaccgaacgtaggctttgtgctttgcctatttgctcatgtcttctctttattctccttttctttaaacattttcttgtgctgtgcagtcttcctgaggtataactgacacagattacacatatttaacggacatagtgggatcttttcctccacacattcactgcataggaattaccactaccctatcttttcaagagctctcaacttgcaacaaaaatttgattgtggtgaagaaaaaatgttaagttcagactttaagtggtttaacaatgatggcatcaagggccagtcttgaggtctatgccaagtgcttgatgtgccttttctcatttaatccctacaaagtctgcatggggtggtcacatttagtctgctcgtttcacagacaaagaacccaagcatccaggaggtttgctccaagctcaaaatatgtctgctctttcagactcacgctaagcatgagcaatgagactggttcacaggcacggcctggtgttcgcgcttgcctggtgccacctctccgctgcctcattcacactttcctgagtaaagaggacacagctggtgttttttaaaggtgtgccaggagatggaagatccagagtcaaggacagaactttctacctgtcagtcagctgccactcaggaagagggaggcagcctgctgataccatggagacaggttgccaagcatccaaacagagagaagaccctctagagcagtggttctcaacttccctaatgcttcgaccctttaatacagctcttcacgctggggtgattttcaccccaaccataaaattatttcattactgcttcctgattgtaattttgctactgttagtggataagcaagcaggatatctgatatgagactcccaaagggcttgtaacccacacttttgagaaccactgctctagaggactacctagctacacgggaaagaagacacccaaggcctcctcccttgcatcaagagggttaagaaaagctagtgagatccaaggaccaaatctcttgttacccaagatcttcccccaagaccaatgagatggcacagaagggaaaggtgcttgcctccaagtctgatgatttgaaggcggtccctgagatccacattgtacaaggagagaaccaactcctgaaagttatcttttgacctccacaggcaccatgacatgtatggatgaagttccatcatatcatatgcacatgggtgtgtacacacatgtaccaaataaataaatgtaatttttgaaaatatcccctaagagccctctcaatcaaaaacaatttcctcctccatcatgtccctcaaagaaaatggccctggaccttgtttggtgacaaaactcatctttgcaatatatggctgtaaattttgttaagaaggattatacacatgtactaatattaacatttcaagataagagttgaggtccatagtgcagtgggacaaagttaaagatcgatactttgcatccttatataatgatgccagtatgatgatatctaaagtttttttttttttttttatcagttccaacctgattactctacgagcagctaatggaaacctgatgaagaatacagaagaaacctcatggctttcttctcactgctccgtactcacactattccacatttctacctcgactccttggcagattcttgtcaatcctctagggtccacaggtattagcccagttaaaaatcagaccaggtttggagatacagctcagttagagcaggtgcccagcacgtgtgagctcctgattctcaatccccaacactttgaagcaaaaaaaaaaaaaaaaatcagatcacacaaagtccactgttgcagacaaagggagactcagaagccatcacaacaggcttctgagcctgagcacacaggcaagtaagaacgaccagacactgagatgttctactgggaggatccaatccacacctcctctatgaccatccaagtccaggagtgaccttgtggcaggcatacatactatctgttatcagtgtcactgtgcatactgcagatctacagagcttaatgtttttattctaagagaaacacaaatatacatagccaccccaacatcattctacactccagtggcttataattgagcaccctctgcataccctgctgctactcccacatatgggcactggagaccccttccttaaagcaactgaaaggcagggtcattcactttgataattgggtgaagctgcctcccattgcaacaccagtatttggtatgaacatatctgatgtcaaccaatcatatcatatcttccatttctgaggttaaacattttatttgtgctgagtgcaaggaactgtgcagaggaaccaactgatagctacagacagagaaaatggacaaactgaagaatcccaatagtggtggccatttcaactgggttgggtctgagctcaccctccccagatgcaacggcactcaagtaaagcagtctgtgagagttcctctaaacacacaggtccaaaaagtaaagctggtgacttctgaaaagggatgtcccttgccaagagatagtctgacagctacgggaactttgataattcaagttctaagaacaactgaggcactgacttcaaggagtctgtgttagtgaagggcccaatgggttcccacaagtgaatctactgattatgttgtctaagggccccctgccgtccctgcattctccattacaagatggcgcctgcatccggcaggcaccgaatgtaaacaagattattgcgcaggcgctgggtaaatttccattccttgatctctgcctattccgtggcgtcatatggccggatgagctgcagccaatcatggggtgacacgtccgaggcgccggttgccagcctttattaggggacgggattcttggctcagtgtctccgctctggtaagcttatgctctcctctcaagacgcattaaagctttcctgcagaaggatccgagtgtcccgtgtatgatttcttgctggcgagaaatacagagagcgcgcgggacatatggtgccgaaacccgggaacatgtgaacatttccagcacctcggagacccctctaacgaggcggattcagaactgcagggtggtaaattcggagaggtatgttttttctggactttggcttgggaatgttgctattgtgggaggttaatatagaggcttctatgcttttactaggagctattttgacttttctcactgttgtaacaatcttaaagaagtccagaattacatgtcagaaaccgaatgtgatgagagatggggcgcgcctaacaataaaatataagaaaaaaggacctcccgggatgtctagtgacaagggagtgaataatttgttaagagaaacaataaataaaaaaaaaggacctcctgggatgtctactgacaagggagtgaataatttgttagatgattctgtaaataagtttaaagctttaaatcttgatagctctgatgactctaaaagctcaagagataaagttttagaggaaacagctcagctagatgaaaaagaaacaaaaatggagaaagagaaaatagggaataaccggtcacatcacggtaaatttaagagaaataaagactcaaaacctagcctctgccctacaatgaaactagaggccttggagctaacagctcagactctgagattttagactctagcaaggaaacagagctagaaaaagaggcagcacgataccaccccagtagatatcggctgccaagaataaagacaaatatgaggccatcgcctattaatccagcgggtgtgcttccatcagcacccccattatatgagttacaacaaaaatttggtaccgactcctttttaccatcagaggagcagagaaaattacagatggctttcccagtctttgataggggaaaaggccatgcatgttattcaacactacttggaggcctgggatgcctgggaaaagcctcatatcctaaagttgctcaagtaatttatgtatgcttgttttaaaatgttctatttcctggtacggccattttgtagctggtcacatgactgacggtagccattttgctaaagttaaaaaaaggatacttagaccgccatcttaactaaaggttaccgcatggaaatcagaggtaccatcttagaaacaagtttttcagttaagatttaaaatgttaatgcttctatatattacagaaagaccttaaggaaatttaaatttctttttaaaaccagttttcaaatgtttgattttattaatgtttatacttaaagagcttcaatttagaatttttaagcaaagcctgacaatgtaaagttcttgtttttataaaagatgctaatctattatgttggtagcacacacctttaagctcagggtgttggtgacacacgcctttaagttttgggcgttggcggcatacgcctttaatcccagcactcgggagtatctttatgagttcaaggcctgcctggtctggcagatcaaattcaaggacaggctccaaagtcacaaaaaaaaccctgcctcagaaagaagttaagctactgtttaagaaagttcagctgtattacaaaaataagactttacctagccacctgtatgcttcttaaaaacagataatgggccggcttatacctctcaaaagttccaacacttctacagacagatggaaattacccatctaactggcctaccttatacaaggcattgtggaacgtgcccatcgcacacttaagtcttatttaatcaaacaaaaggagggaatgggagcatccttaccctcggtgccaagagttacaatatccatggcactctttacccttaattttctaaacaccgacgctcagggccatacagcggccaagcgtcatacctcagaggagatggtaaaatggaaagatgtcttaactggtctttggagaggcccggatcctattctcataagatccaggggagcgatatgtgtttttccacaggatgaagagaatcccctgtggatcccggaaagactcacccgaagagcctctttggaccctcaaaagtcggaactccaccctctccccgggagttgagagccgctattatccagattaactcctgtccttgacggagggactgtcatcatggattgcttcagctgtctcctattttaaggaaatgggtggaggtgggattgtttggtgcagccgtttgctgcggattgatgttgcttctctggctggtctgtaagctcagggctcaaactaagagagacaaggtggttatcgcccaagcgcttgtagctttggaacaaggaagcaataggccgctggccagacagctcttgcacacccggagcctgggctcattgcacagggtagagtgcctggcttgagcagcccatgagggatgctgagcataggcatcgcacagagttgcctattatacaggcttctctgggaggtacgttgtcctgcataagggttgcctgccctagtctccctttcccagaaaaacggcagaggacaggtcgagagtgcttcgggtcaagctaacagcctagttgcgactcccgtacacagtcttaatatttgattgggaaggtacaacctctgcctctatccctcaacatatgggtgacctatttgcttgtaaaaatataaagccttatcattaattaataaaaaaagggggatctgtagggagccgtccctgcattctccattacaagatggcgcctgcatccggcaggcaccgaatgtaaacaagattattgcgcaggcgctgggtaaatttccattccttgatctctgcctattccgtggcgtcatatggccggatgagctacagccaatcatggggtgacacgtccgaggcggcggttgccagcctttattaggggacgggattcttggctcagtgtctccgctctggtaagcttatgctctcctctcaagacgcattaaagctttcctgcagaaggatccgagtgtcctgcgtatgatttcttgctggcgagaaatacagagcgggcgcgggacaggcccccaacacctattttaattcctgcccccattcaagtcagtagagctcgagctttcctcagagctcctgcctgtggactgctcttcactcaaaattttcattccaaaaggacagaccattagaacaatgaacctgggctggtgtgagacataatgtggtaaactgagagttttcaacaaacaattcaactaatgaaggtctcaggtcctggaatccaagacatgagagatgtcgtgatgattaattaattctatgaagcatccccagcttctatataatgaatgcacaagttttccattgacacaaagcttttcctatgctctacacaaattatgtattaaaaaaattaagattgatgctagctggtccaagttctcttattaacttcagacactgaacatgcacatgtgcacacccagagatgccactgtacacacagccaactgcatcactagtcttaagactatgcattcacaaagaaaaagaatcagcacagacaacatcaatgggagctcaataaagaattatgttgtcatttagtttaagtagccttacataattcctattctttgaactggctctttcctgaatatgagaagtggcctttgccataggccaggggcacagtgtattcccctgctcattaggtattccattagcccattatgagagctgactttcctctgcaacagagttgtccttatttttattattattatttttaatttttttggtttttcgagacagggtttctctgtgtagctttggagcctgtcctggcactcgctctggagaccaggctggcctcgaactcacagagatctgcctgcctctgcctcccaagtgctgggattaaaggcgtgcgccaccaacgcccagccggagttgcctttagtgtcccccaagtgtgtatgcaaagatactcaactcaacactgtgtaatatcaaagaaatggaattaaagatacaacttcatacctactgaaacatgaaaaccaacagcaatgacaataaaaacacatctggcaacaccaagcactgatgagcatgaggaagaactggaatgcttcctcacggtaggactaccaagcacgaaagggactgagaacacatggttttataagacccttataaaccattcattaaccaaataacctagtaatcatgcctctgggtgcttactcaagtgaaacaaaactatgtcacacaaaagcctgaatgcagatgtgtaagcagctcgactcagatcatcaggggctggagagatggctcagcagttagaacatttactgctcccacagaggggcacaggtttgttcccagcacccacactgggcagcagctcacaaacaccagttccagaaaatctgaaccactcttctggtcttcctaagtacctgtatcatgtggtacatagaaactcatgtgggggcattcacgcccacccaccctcacccacccacactaagataacaactaacaaaaacaacccactgtgggttgacttgggtgactttcaaacccagcagcaagcagtgactcactctgctttcactcaactggcattcttcagggtcagagaacatctcaggggccacatgaggctaagcacagggagggaagatagtgagcatggcagtactgtactcggggtacaaaacaatactggcatagctacgcaaaagagaggaggttaggtgagggaacagtggagtagtttggttctgaacacagtgaagtagatgtttgcttagaccacagaactgtaaagtaaaaggagtacagttctatatagaaactttactagctgtaaatgaaaattaagattaaaatgcacttccctgacccttcttcatgaaaacgtttgagaataaaacactatagatggatttagctttttttcagctcaggccatgtaagacataacacactctgctgtaatgaaagcaagaggtagtagaaaaactcctcacccccaaggaagatggttaaagttccaactttccccaggtttaaaaaaaaaaaaaaggtactaacaatgtaatgaaagtagagaatagggattgaactgggtcaacaacagccacgtaaatgctctaggtggttcacaggtagagatgaaagagggctatggaaaacacagtcaagacagagaatggtgaggaaagacttcagatgggcaagagagttgagcttccatcaacaacagaaacctggagaacaatagacactcaaggacaaaacaaaaacaaaacaccaggacagcagaaattgtaccaggtttgtgctcatgtgctagcacctagagctcacagtagtcctgtgaggcagatgttacatgttttcctggtcactaatgagaccaatgggccacctggcctaaatgacttgccaacattcacatcataagcaatggagaatgcagggggtcctgaatccactgatgggcagagtcaacagtttcaactccaccaagcagcctccaggacaagggaaaatggttgcctttaaagacctggatacctagaaagacatccacggatagcaacacacacagagcatctctattacccagaggtcaagaccacgggaaggtgaagggaataataatagcacttgatccccaagatgcattcactaacaaagtaaaaatacatgcttagacttttactaagataagcatagtataagatctctatttttaattttttatgactattaatgaataaggaattaaggtataaaattacatcatagcaaagtgatcaactctgcccagtcatttgccaactcctgccttacaaaagacaggatgcaccaatctgtccagtatttgttacccaagaaaaatccacaaccataaaataacaggacatcttagatttaacccatcaagagaaatgcaaataaaagatgtcatacaaaaacaaacaggcaagcaaacaacaacaacaccccaaaccagtatcgaaccccaagcaagctaccttttagaggatgtaagttcaggtgtaggttgtagcagaataggaccagaggtacagtaattgaaatctaagtccaataccaatcaaggcccaaagaaactcaacagaaccaaaaactatttccaaagagaaatgtgaaaactacttgcctagaagttcccaggcaagtcagtctacaggaacttagttacaccacacaaatgcacatcccagtctgcccatctaaagcaactctctatcaaaacaataacatcacaaatattgaacactggatgaaggttcaggaaacctggcagatgcttactgatcccttcaatttcccttcagtgatgacacaagtaccaaatgccaatccgtatttgccttaaagcaggacagttctgaagtgcctccaggtgcaacttcacaagcttagtaacttaaacaaaaaagctaaagtcaaattgtaataggactccattaatttcattattttattaaacccactccaaagttatggaaaccagactgaaaatgtgaccctaccccacccagctccatcaaacacagagagtcctcgagtatgttttccagatattttgcatctgcactctaggcctgttactttagacatgcagcctcagaggcgggtgctgaaaacgcatgcacaggaatgggaaaaactgcaactgaccttttctggaagctgggattcaacctctttcttcagtctcctcagtaaaaagggtctcaacaccttgtgcagacgcctgatgatcaagatagtttcttcttcatttaagtccacctacaaaacagccttagatgaattcgtgaaggaagtttcacacagagaaactttgtatttcaatatgctactgagatttcacatgctataaagccgggtttatgagagccttctacacctctaaatcctcttcccacctgcctaccccttgggaatagaatgacctccaaataggtgtctttgccttagagtctagttctgtgggaatgggcccacattagtaatatgaacagccccaaacatagactatggacaacaataagggctaacttaagagtgacagatgggaaaaggtagcaacagtttgtgtgctcctacatcagtggaagcccttgaggtttgtttgcccagtgcagaaatatacaaagggatgggtgcttgaaaatgaaaatgggaagaactagagcaagtgctctttaagctaggagggctcctggctcctccatcatcgctcctttccctttcttggcccaagtctttgttcaccttcctttgttagcctctagggggcagaattaattgacattgctttctctaaatgggcaagtgagttaatgagcagcaaatgtacctacctacaaggtacctcaagacaaaggattaagagttcaaacatagtttctctaaagcattttcgtgtggcttttcattcctataatcaaggaaacgtcaatcaaaagggcatgtgtcccttccggggatttttttccttgcaatagcccaagcttgcctttcatgggctcaaagagaagatggttaaaggaataataataacagcaacaataataaagatgataatgataataataataataatacatttgagaatagctactccaggatttaaggagtatttatgtacagataaaaatggaggcttacactaaaacctgaaaaaaaaatgtgtggaaaattaatacattacactcaaactctatgtggaagtatgtctaaggagagtcttgtgtttataacaaggaaagatttctgcgttcatattggattggttgagttggtttggttatactgatcaagtcattctcaccctccctgtggcatgctgtggttgaacactatcagtctggaaaaagctggcaaaaggcaaagaggctgggatgccccatatgaatctagattcagaggagaaaacataatcccaaatgagaccagatcccatccactgaccaaaaaacattgtaaaccacctgtgaggtttctgtggctcttatattccaagttttatgccctctgctttcattttaccaccacacagtggaaaatatacacaaacacatacacacacatagacttacagtctctctctctctccccctctctctctttctcccacacacacagtctctctctctctctctctctctcacacacacacatacataaacacacacacacttacagtctctcacacacacatacacatagacttacagactccctccctctctctctctctctctctctctcacacacacacacacacacacaaacacacacacacagtctctcacacacacatacacatagacttacagactccctccctctctctctctctctctctctcacacacacacacacacacacaaacacacacacacagtctctcacacacacatacacatagacttacagactccctctctctctctctctctcacacacacacacacaaacacacacacacagtctctcacacacacatacacatagacttacagactccctccccccctctctctctctctctctctctcacacacacacacacacatacacacaaacacacacacttacagtctctcacacacacatacacatagacttacagactccctccctccctccctccctccctccttctctctcttctctctctctctctctctctctctctctctctctctctctctctctctctcacacacacacacacacacacacacacacacagtttgaccagtaccctttcgccagtcatggcaaatggagcattaaaccactgctcaaatgtgctgcaactcttgaagattgtagggagaaggaagttgaggagggcccagagttcagggagcttattctgtagcggggtcccagtcaaaaggatccttctgggggcgacatagtgtgtgttcaagacctgagtcagcttgcaatggtgattcttcattcggtggccttcatccacaatcatgtatttccaccgaatctgaaacacaagaggaagaaccagtgtgtagttagtaaacagaaatatagtggcttccaaatggcggggtatgtgtgtgggaaaacaaagaatccaatttagcacatggatacagaatgatatctttaagagaaaggaatcccaaccaatggagccttgcccacgcctggcagaatgttaaaacaacaatgctcctctcaggacaagtgattccagttcacctttagaaagaaaaaaccaggcccagagtgcaatgggcactcctaagtctaggcctggcccctttccacccaactgtcttcttgtttctgtgtcaagacagatcttccagacttttgtgatcatgatacccctgtacatgtacagcatgaacttaaagcctcttgcagcaggcattagtaactggtttctggaagatttgggtgttgatatcctggcattatgctgacccagcccagataactggcagggcaagtacatgggcattcaggcagatacttaaacagctcacagtaccatgcactgcatgtctatattgtgtgctatgtggctgcataaggactctatacatgtgcaagttttcccttttaagcaagcgcctccacctattctctctttttccatttctgctcccagtcggccaacacctacacctcccttcgatccctttcccaataaactccccataggttttgttgagttttgtggctcctgtttcattgtctgtagctgcaccaaacaacagcagtgagggcactatctcctaggccctcttgccttcctgccttctttcctaatagaccagtggtctgctacctctagagatggctcggtgttgggttgctaacactggaaagctggaatattacacacaaaaatctacacatttagtttcttaaaaaaaaaaaaaaacaatctgggtgttggtggcgcatgcctttaatcccagtactcaggaggcagaggcaggaggacctctgtgagttcgaggccagcctggtctccagagcaagtgccaggatagactccaaagctatacagagaaaccctgtctcaaaaaacaaaaaacaaaacaaaacaaaaaaaactaacaggcctcctcagttcatgcatgtccctcacctgccaaaatgatcaaagtcttattggtagaaatgcagtgccaaactaccatcttccccctgggccaaactttgaactaaacacagcaaactcctcaacacgactaatatctaaaaaggcaagagtgagcatggaatgatattcccagaggtcctttcctatctcataccctacctttcagcctcttcaagtttactgctcaaagggagaactaggaaggtcataccactaagcctagcctttgtctacaccagtggttctcaagcttccaaatgccacggccctttaataactcatgttgtggtgaccccaaccataaaattattttcgttgctaccttataagtgtaattttgctattgctatgaactgtaatgtaaatatctgatacttcagatggccccaggtgaccgctgtaacagggtcgttccctgtgaaaggggttatgaaccacagattgagaatccctgacctacacaaagatggcattggttaaaaaataaaaatgtctgctgctcagatgtctctggttctggagtgagagtcagaggaaggagacaagcaagtatgacataattctcacctcctcattagaaggaccagtgaagccagggaaaagaaaaaacaacaatcagccaagttgggatatccagataaaagaaattagcagcatcccctgccctgtatctctaccactgccaagtgtgtaacaatgaccaaagttctacagacaacttaccaacagcagtgaaaaagaggtctacagataaaaatgcatctaagtagatattctaaattgactctcttcttcagttgggcttatgaagcagcaaggaaccagagacctttgattctgccactgagtatgtactaattaggtcttctgcctagagaaattaccacccctttctggaaagccatttctccagtaacaaataaaagcacggcttctcgttaccaggcatctccaatgacttttgaaatacatatgcacaagacactagatgatttttttttagggatctcaaaggcaaaaacacattcccacagtaatatttggagacacgtcatttttgacactgccaaattcatctctcggagcatgaagaactaactggaaggcggaattgctgtcagtgtcatctcaattattaaatctcccctgggcatgagtttcctttatgttatttcctatgataccatgaagggaactcacagctcccagaacaaaggtttaatgcagagatggaacaaaccccagaaataggacttctgctgaattctgaccataacttagtttcagattagaggtttccaatacactacagggcaaagaaaattaccatgggggcggggattaagttttcatgatttgttccaggaaagatggtacgttcatccttctgcacgatcatattaggagacaacatgagataaatgggaagaaaaccttcccatttgtggctaaaggacaacttgaaacatacaaatgaggagccaggtaggtcacagaagcaactctttctcagcaccaaataaaaagccccaggaacagccctgagtaatttaaacaataattgtccgttattttaccaggaaaaaaaaaactgaaaacagataaagcacaccagcttcagcttggataaatgctcagatggaggacaccatctggaggggtgcctgcttgccttcggagagagaggcacaagaggaatgaagctgtgctgacaataacccagggcaacaaaaacaattatttctttccaaacacattcagggctgctggagagaaaaatcgcaaaaggaacccaggtgaattttcttaatagatgtggaactggggttggagagaaggctgcttttttaggggacccatttctagcattcacagagaggctcacatccttctctaagtccagtcccaggggatctaatgcccccttttggcctccaagggcactgtgcacatgtgtgttttgggtaaaacactcatacacacaaaataaaaataaaggaaattaaaaaagaaagaatgtgaactcactacaaatgggcagggaggagcctaggatcaatcgatcaatcaatcaatcaatcaatcaatcaatcaatcaatcaatcaatcaatctcctctctctctgtctctctctgtgcctctctgtctctatctcccctctcccttcctctctgtctctgtctccctctcctctctcttctctctcattctgtctcagacacacacacaacattatataaagtattaaatcccatgaccaagatttcaggaaaaaaaaatgaagaaaccagccatctaatgatcaaattatactattgagtacaattgagggatactttacactctggtaagatgatccacaattagagataaaagaaaaaatttttttgaaaaaaaatcatacctttgcaagaatgtgcttgtcttttataatgtattcataagtagtcaggaggacattgaatttgccactccgtagctggggaacaagggagcgtcgcatggcaggggtaccctgaatggaaagaaaaatacattgattacccactggaagtacataggtgctatttctcactgttcagagcttaatggaacctagacaggtgacatgcacataaatgtattaccatatactgctctattatccctgaagaaagtggtagctaaaccacacatatcttgaccctttccagatcctttcaggaaggcttcccacttaaggccgaaaaaggagaagagagaaggaaattgcagcaagcttgcagtagcagggaacccgttgcttggctgaaaagctccctttctgtgggagcgtgcagcaggcagccccagcgccccagtaattgcctgactttgcaggaacattcggcacagtagcagcccacagtgaggcagtcagtagcacacagaaagtgcggtatttgtcatttgtattactctcatcagaaacctcgcaatatgataattaacaattttcttctgcatttcactatctgaaagtaattatggtttattacagtaatcttcttgggatgattaactctcactgtttagtacatgatgtacatgacaaaactttacaaccaaatacagttcacagatgtgcatatagaatgaagaaaagagggcccaatttttttttttgcttttccacatttatatataaatattaaagctccaaaccttgtaagaaattttcaccacagaaggagcccatttgtcaaattcatatgtccagttagacagagtcctacaaaacaacaacaaaaaacacagtaaacacacacatacccatgtatataaattcagttaatagaaaactgttacttatttttagcccttgccttaaactgggctaaaaaatacaaaataccccagatacatatttatgctaaaggtatggagataggaggtaagctggaaatgaagtgccacaaaatgtgttaattctacatttcaaaactcataaaaaaacaattcaaaactggacaactatgtgtggtacaaaacaccagagttttcctgtgcttctgaaaaccaacaatcactgatgctttgggtttgtcacaactagccacgtaagctccaagaacttcatatggggaagagaaattacaaaaccataagaaacagtaagtaggtctatcaaaaagaagcaagagatactgaatgattttttttaaaccccaaaagtgtaaccaaaatatccaagtcagaccatgcaaatataggtctaatgcaaagggcatgtaaatattatggaggcagataagtcagagccttcttttgaaaaaaaaaaaaatggaaggaaatacaaaatcaacagccttgttcttcctgaaggtctgagttgtctcaggactgcaatccatgacaagatctcagtgagtaaagtgtcaccctgacacgcatgcatagaagcacttcactcccagggagggtggctcaaagattgttgggtaaagaccagccggagccaccagtgggcgaggacttggggctgtgctagaaacagcaaagactgtccttctggagcaacgagccattgaaacgccatgtgtacatacaaagtttactttgatgcagagatcacagcaatgattttaaagatacaataaggaaggtgtacaagtgtaagtacatcaaggaaaatagctctaaaaatgctctcacttttcccttcaaaaagctacttactcggacccattctacatcagccgttctcaacctctgggtcatgagccctttgggcaatggggtcacataatcagatatccagcatatcaccaccattcctaatagcaaaattacagttccaaagtagcaatgaaataactttatggtgtgggggggtcaccacagcatgagggtctaaagggtattaaagggtcttagcacgaggaaggttgagattgctctacagggtgtaaaatgttaatggccaataagaatgactacatagacgtactttactagccagccaaaaggctgcagtgggatgggtgggcttgggtggaaaattaaaaccaatattcagattatgtattcctggtattccaaaacgatactacttttctatctgaaatgggaaacaagggcgagccactgatagggcaatctccaacatagagagtgatgactgtggaataaattactgtacttacgagaggggaacaatgatgagataggggccattgagtcttttgtgctccatcagatatgtgatgagtgcaatggtctggatggtcttgcctagccccatttcatcagctaagattccattcaaattgttattatacagggaaaccatccattccaggccctggagctgaaatgaagagtaattgtttcaattatccaagatctgcacaggtaattaatactaatacaactcaagtgaggctgtgacttcttaacttctccatgctgtatgctgagtttcccacagtagcaaagtgggggaggcaccaacgcaaaaggaatttaaaagatgagcctgtaatcgcccctgctgcttggcaggtgctcggtgttaatcagatttagaaaggatgggctatagcgcactggtgggatttgaagcagctttgttgctcatccatacttaacatttcacagtagatgacattctagaattattataaatgaagaaaacccaaaccaaaatctattccaaccactccaagaacaaaaaaaccaattcgaggattaaagacaaaccagaaggctgagctggcacacagaccactgatcatcagaaacctctttctggatcatgaacagcctgccccagggtgccatccctgatgcaggaagcctgtgaccagggagccaaggccactcggctggcctccagaaggacatttctcttcctggcaaagaaaggccccaggcagcacacagaaactctgcactgtgggcactttgagaaggcagctccctggaagctggctgcctggaagatggacaatgcattttctaagcatggaagcagtgcacccaagtcccagctttagattctcatttaagcacaaaagaagaatgaggtgagaacatggattatcactatcataatgcaatgctgggtttaaatgacagcatcaatcatatgtaacataagtatacatatgtgtatacacacacacatacacacggtacagtcaagttaacttgctaattaagttatgctgagaaaacattatgaccttgcacttaaaatgtttaaacaactcttcttcacacaggatcatacaaggaactacagcagatggatgccaaggtagactcacagtcccttcagaagcttgtgtcagggaggaagcagtgaacactctctggatcaagtagcccaatgtgatggaggggcatacacttgtactgatgacagttttcctgagggaagcaccatgaccgtctgaagattctcctaagacaaaggggaccttgtgcaagacctaagtcatcttaaaagtttgtaggacagcaacacaaagagagaagagaaacagaaaagcccggagagagaaggggtaaacagggagaaggaggagacaaaagggccaagtgggggaagagattcaaccacaacaaaggaggccaggtgatggccaaggcccagcccagcacttgggagccaaggcaagagaatcaggagttcacaaggttatccttgactatggagtaagttctgtctgacctgggctatatgagaacctgtcttaaagcaaagtgtgtacaaagctgccataatataaccatggctctgtaggctaaatctaaaaaccaagttaaaagagagagaggggtaaaggggacaggatggaaaccacaatggtaggaaagacgagctgtttgctatctgaccaccagctttggggaagtcagctaaatgccagaaacattggtaagaagggagagagggggagggggagggtaaagggacgaagacagggagagaggaaggggaagggaggaagaggtagagggagagagggggaaagggaaggggaaaggagggagaggggaaggaaggaggtgagaaggggaagagatggagagaagagaggaggaaagagagaggggtaggaggaggaggggggatctcagataaaagaaaagcaaaaccagaggcaggggaggagcttagaatctcacaaagcatgtggaaagacacttgtgctctcctgggctgtagaatgtgggaaggagatgaatcagagcagggttctctagaaggcagcaggaaggctgtagctagctagctctggctgccaaggtgaaacgtgtcaggcagggagtcacaggaagcttgcctgggaccacctatgaacttgctgtgagaaacagaaatcataaagcaggcaggattgctcagactgcaggagaggagttttcctgtcaaaagcccagaaggaaaggaagggtgcacttcatcccaaggagtggacagagcccagccagggggtggggagtgcacaggaattcacatctggaagtaggaggggctagatttgataggggggcatgaagactgctaacaaaggtgaggaatggcaagaggaaagcagtatggcatttacatctatttatgagggccatctgggcgcttcctgccaagactgaattcagttcctggaacccacatggtgaaaggagagaagcaacttctacaggttgccctctgacctccatgagcaggatgtgacagacagacacacacgtgtacacacacacacacacacacacacacacacacacacagtagcaaaagtgtatatatatatatatatatatatatatatatatatatatatatatagaaatggatctgccataccaaatacagcaaaaggtccactgacgagatatcaagtaggtcaaatgagattaaaaagaataccctgacctcataaaaggggggtggtgtggccttacagggcagtgattttcaaggtatgtttcaagagctccagggaaagactttcccaagacaatccgagagatgaaaatggtttcagtaatgctaccccggcattgcttgtcattcttccgcttttgccatcagtccagacagggcccatggaatgatgggaggcagtggctgacctcagggactttgagatgattgcttctacaaatgatattagtaaggggtaatataaaagggaaccaggcagtggtagagaaagatctttgagaacttcggattccaaccttccaaccgtgcttaaaaagttacttttctataggatgctaatgtccacaatggagaacatttatctcccctgtcctcaataagaaggtaggtgctgtggatggacagagaggagtcactgccgaggtgattttgcagctggcctgagacggtcaactaaccctcaccagcatccacatttgggatactaaattacaatagtttagtcctagcaaatggtatcacctgcatttatctgaccacgaaaggttactatcttattttagcttttaatttttgaggaagtaactcatggaacaaatgtttcaaggaacacatttcaggtaaccaggtagagaagttagagcgagaagacaagacatgtcctggaattgaacaggtcaaaggaagcacctggcacatttacagcctggtttttaaccaaagcaaggaggtgggggaggtcaacaacttaattgttccttaagaaagaggtatatgtgtaggagattgcactccggacccctaccatcccactatcgctacaactaaagctgaagtaatactgcatttacttcaggttccctgcctaatggaatcaggctgctttttttctctttttgcaaagaatcacagtgaaactggtccaaatgttaagctagcatttctttcaaaatccatgccagggtgacaaaaacaaacccagtgtagctgcaatgttgagcacagtgctctgaaggaagccctgtgaagagtcgggggttgggggtggcgggggatccttccatattataaggtattcaacccagaatgtcttcctgtctttagaacctcttcctaagctgactacagctcctaaagtggagcacacacatttggggatgacaggtatgcacaaccaaggcttgctatggggccacaaacacaccggttacctggtaatgctttagggtcccattaatgaggagggcagactgcttctctaccctctcggagatggcatgggccaccgtgtagtaggactgcgaccctctggcactgtactgcatgctgtattcatcgtccacatcctgtttcgcagtcctgaagaagacaaagtagaaagtccatggagctatttgaatctgagttctgtcacgagaaatgacttgagagcctaaaagtgctgctgtgggttattacctgccctgcagttaaaaacattctttgtaaagttcacagaaactgagaagggtcatcctcatcgtatcagctccacatcatacatgtgaagaacttgtaactcacagaggttaccttgagggtcccaaaaggggccctgaccttcagaaaccaacctgcacagctggagatcagccctttgccaatgaagctgtcctgggtgtcctttggatgcaaagataaatcccatccataggaaactaggaaagcttggaggacaagtaggagaggactgaagaggatattggaggggaaggacaagataaagggtttccttctcccactatgcctcgtgggggtcttttacccaatgcacatggaagagccactgcccattcttttttttttaaatttattatgattacagcattcttaagatttacttattaggtatacagtgttctgccagaaagagggtaccagatttcattattgtaagccaccatgtggttgctgggaattgaactcaggacctctggcagagcagctagtgttcttaacctctggccactgcccattcttaaaagtgtcactgaaaaaccatgggttcagtggaaagcaaaggctcctaaagtggggcaaagaacctgggaagagaaaaacagatcagaacacccatttcttcttgttggaaagtctcatcatttgaatgccctcttttgtctcctatttcagaacaatgctccaataataatagccacacaagcaatgaggtgtgtggatcactatcaggggatgggctggaatggggccagatatggtgcctggcacccagacagcagaagctgaagataaatttggacctgggcagagtggacagctgatgaagctatgacagccagaatgacaaaagaatggtattcacccttggtctttctgggtatgttgatggctttgaaggaagaagggaaggcaagcaatcccccccacacacacacacacagtgggggactatgtaagtttgattagtctaatctggaatagaagtacaaatgacaggcatgaagtcaagaaaagaacctgagcaggagataggatgctggagtcaagggagggagggagggagggagggaggagggagggagggagggagggacggatgaaggggagcaacacaaagcccttgaccagaggagtccagagctcagaaatgtcctgtgagaagctgaggggacactctcgttggagtgtgagtatgaagtctgttcctgtctttaaacaggacttttacacagaaaactcacaccgcatgaacctccaacactgtacttgtaattaaaaactctgagggccacatactcaatgatctgcttggcgtccttttcggaaacttcttcactgtttggatccagcagtatcttctcctccgtttcctgcctactggactcttcttcttcatcctggaggaagaacagagatacaacaaggcctatattttaacaacaacgttccatgatttccgcgttttataaagagaataaatagtattttacttcacaaatgaagcaagtaaatccaattaaaggaggaaataaatttaacaactgcttaaaccaagtaattcaccatttcattgctgaatgagagagaacaggagatgctcctaagacccgtactcccaagaaaagtgtgtgaaaaatcataccaggaaggcatgtaattatttggtcaatcaaagcagatatacagaccatagctctgttttataattcaatattcctctctccaaaagcaggtatcaaagacttggcatcctccccaggatgccctttttagtgatgatgagggactctgtggtccccatgactgtagaggatctgacttgctaagcgtgctgctttctgaggctgcttcacaccacacaaccctgagtgttcagacaaaagcatcattcccttggcaaagaatgtcatcgcctccctacctgttggaaacatcactaaatattcattatgtactaacctgacactcaaagccagtctaaaggtgaacatgtgtttcctagcaattgactgaaaaatggacacacatgacaagtatcaatagtgacacaagtcaatgacaccagatcactaggaagtgcctcctagaaatgaggtgctaaaagtcactcactggctggtggcctggggctcttgtcacttggtcagcggagtgcatctcttctcagctgtcagaaggtgtctgcagctgtcaacatctgggcagcaagggctgcctaaactgcccactgtatcttatctttatactgccaggctcttcctcagaaagaaaaaccttctaacagatcatttatggacctattcactcaagtaagagagagagacagagagagagagagagagagagagagagagagagagagagagagagagagagagagagagagaatatctaggagatattatcatgccacaaaagtatttgctctttttttgtatttgctttttaatggttatgttttttcaaatggaatttttattgttttctaaaagcaataaatgttcatggtatattaatttagaaagcaaagattcaaactacagaaggaaaatgaccattgccttaaaaccctcgccagttattaggcaaggctgtgtcagcagctgcctggcatctatctgtggcatgctgcactagtgtcctaaccagacttaatgactgtaccagccagattcaagcaaaggatataaaatcacttaatcttttttatttgtactaatcagtcatgccagaattaacctatcaaatacccttactatttcttaatctctagtgaaagtatccaaaattctcatttcattctacacatgttaagtattccttccaagaaacagaaaaatatatttccttttgagtatccagtatatccaagaattcaaaattaacagtcacatttaaagggaagtccagatgaacattaaagtctttatgcttgcccatattgccttttccatttcaggcaccagactcaaatcttctaatgaactccaaggcttggaagacttcagaagttcttggccagttagctcttattcagaccacttggggataaggaactgcctttccccaagaaatccatcttcaaaattctgcccccaaaacctttgtaccatctctagtccaacaatagctgctctccttggttctaaatgaatttaggatttgtcaagatgtctcaccagtcagggactatcactacagtcactaggcacacaccaccagaacctatccagacactttgacccagtcatgacctgaaaacaaacccagggggtagggaatggaggctttgggggctgagcccacatttgtgaagagacacttcttcgtccttaagctttcaagtcagtgaacccccaaaagagatagaagtccacatacctcttcctcataatcagagtcactctcttcgctgtcagatctgggagcaacttcatacctagggacaagcagaggagaggagggggctgatctttgagttataaacacaggcattcgtgacttaactgcagcaccctacttataagagaccaaaacagatacaaaacttcaccatttctttgcaaatgctacacaggttttgtttgggaagtttgggaatcttataaagaatgccacacccaccctttgtcaaagaagccctaagcacccccatgtttctacatcatacccaggattcatctccagccaggcatccaactgacttgctttgggtgcttcaggaccaaagaggaccttgccagtttctgtgtgcgtcactttgacgggcaggtcactcatctggctgctttcatcaatgggctagaaagagcaaaaagaagtcaagtaagccggggatgttaggaggctctctcacgtctgtgatgggtatttctcaggctcttggttgtttagtatctgaaatgtctttctgtgtttcatcattgtagtgcctaatgtgtcttggtgggcagagagagatcaccactcactggaagctaaggtagaagggtcacaagttaaaggccagcctaggctgcacgctgagaccctgtctccaaaagatcccgggctttggctgtgacttaatagtgcagcacttatctagcatgtgaatttgatctcaatgaaaatctgaacacactggcctctctggtatccaaggcacaggtacaacgccttggcttttctaattggctgtatttgtcaagactgagttagaagatacagaaattcaaggaaactagggtgcaggcatactgacagaaggccagtcaaggaggcagcaatgctagtggaatggcattggctgtgccaagctcctccctgctccaaatagcagccacgtctttattagtccagttgtacaggataatataaagttaggttagagcactattattctccaggtagcccttatcctgttacacactgaacacttctaaccccaaaacgcaaaatttaaaacttcctgagcgtggacatgatggcgtaagtgaaaaatactataactggcaccgtgggaagggctatccatagttagtcaaaacacaagcatactaaagtaataaataaagtccccttcagactatgcattaaggcctacctgaaaaagaaaagtaagatatatatgaaccaaagatgcagtgtatgcttagacttaggttctatccccaaggtatctcatatatatctaagtaccccatggtccaagccccaaacccacaacctgagacacttctagctgcaagcatttaggccaagggatacttgccctggaacaaagtctgttctcatttcaggcaagcaaagctgattcaggtcatttaaaactaatagttccccaatccttcacctaccactcccaggggaacaattgctgtaagctgtggttttggatagaacaatgaagtgtagcccatctaccacccaacaatgttctttatctgaaatcaactccccggaatggttctaattcaaccattggaattgtgtgtatgataaacaaacgaaccagaaaaacaaaaacaacaacaacaaaaaacccctgcctatctgaaatctgaagaaccgacaaagaaaaagatgaagttcattaccagactctacaaaataaaatggcttgctcagaaaattaagttatgtgaaactgcagaggttatagataacgtgccccagggaataaactgtcttaaaggggctggaaatggagcaaccctatgcaaatggatgcttctaattgtagggtgaccgacttctaggagcagggccctgggtaagacatttggaaacgcttcatttgtgtgtgcattccactatttcctgaagagtagtgaaatggactatttaggcaattcattacttcaaagaattttccctaaattactcttaattagttttgcagtcaaatagatacatgcaacactattggtgcaattaagattgtcatataatttattccaattaagcaaaaaatgataaggaaaaacagtgggttgatgttactttctatatcttagagaaaataccctcaaagaaacccaaaccccagtagttctctccttctattccctcaacaaagcaccatcagaattagaacaaatatcagtggctattcacaaagataactttaaaagcaaaggcttgccccagcctgtcagttttcttcactcctacattggctaaagcaatcgttctgagtagcagtgctttgcatagcaacagattcttcctcattaatgtaaaaggtcatctacacacttgagaggaaaagaagggaaatccagcatttgctaccatttccctggaaaaaaaccatatcttgttatcgtgggctattataatacagtgtgctttatcgctaatgttgcacctcagagaaaattggaaatcactgtgagtggaattagaatcctggcaaaaggacagaatgaacccagaagagaagaaagaacattattttagaaaaactaagatgcccatttgcaaacttcagccagcagaactcacacatgttaaaaaaaagacatatgtcacaggcccaagatcagaatttaatttccacacaagataaagagctgagaggacaagaaggtgttcagtcaccctgggtacctgggaactgcagatgatgagcagccttctcagagaaggctggggtcctgtaagccgttgttgcttctaagtgctgtgacacagcagccaccctggtaacatactgtgaaggatttctcacacaataacttttaccccggtctcttcctgccctgtgatggcttagagttgctaggtcaacattcaattctaaaaggtttctgcatatcagtagtttaacctttcttcctgcatctggccagagaaactcacatggaactcatgtgcccagtgattccagaatgaaatgggcaatctccccatcacaggatgctctaagcagtcttatcagtgtccgcaaatgaaggttgttcaaaacaaactctctggtctggtacttcttcattgaattactggacagacacttcagagctcaggagaatatcagaaatgctaggatatacaattaaagacaatgcctgggtagctccacatacaatctatattatatgcctacagaaatacccaagaaaaatccagaatatatgagctttttggcttatgtatatttgtgatttcaaattagtaataaactagggattggcctgcattttatgactctgtattacttacttgccacatataatcaccaaatccctttagcctttacaccttcgacacagtcatgatatgtgtttctttgtatataaaatggtatacaagagactatcagttgatcaggaatcttgagacagtgttattctaattttctaccaagttaatggccagtagtttgaaggaagatgctcttaatctctctcagtctctgcctccctgtgtgtgtgtgtgtgtgtgtgtgtgtgtgtgtgtgtgtgtgtgtgtgtgtacatgcatgtgctcattcatgtgtatgagtgcagacatatgtgtggaggacagatgacactcttggggggggtcagatctcttctgtcactttgcctgagaaaaggcctcatgttgtttggctctaagagtttgtggctagctggtcctcaagcctccaggggttcccctgcctttgcctcccacctcactgcagatacactatggctacagacacatgctgccacatgcagctttacatgggttccatgaattctaacttgtcctcacacttgcacagcaagagctctacccaccatgccatctccgcagccaccgatgtactgtttctacttttagagaataagtaaggggctgggagatgcttcagtagttcaaagcacttgctgctcttgcaaaagacccaagtttgttttcaggcatccagaggctcacaattgcctataaccccagatccagggaaaagacaccctcctctagcatctatgagcacttccccagcaccccccccccacatatacacatgcaaaaggacaaataggcagagatacacatacatagtcaaatacatgtgaatataactttttaataaaaatgagtggctcagagtaaataaagctagtgtacacagagaatggtgcaacagggtatgtctgactcccctagaagaacataagagccaatgggtgccatgtcccttacctctccatcgggtcccagggcagactcccctccctctgcattctcttcagccttctgcaaaacaacaatgtcaagtgttatgtatacatcaagaatacaggacagcaatttacagcaactatttcattaccatggcccatcctctcaaaaagcacacatgtgaatgtcttccgtttttgtttctctttgttgagacaaaacaggcactgtattaacaacttgtaaagtcatttaaagccagatgtgattcaaggctggcccactagagatctgttgatcatatctttagagacctttagagagcctaagacatggcaccatcaagacagaaggcagaatcagaaacattttctcatgtttggcactgaaagcaaatcctgacataattagttcgactttcctattccctaagcaagttttcctgagcaatgaagagcagcattctaaaaatgtccatcaacaataagcagcacaactgctcctcagtcataaaaatgcaaaacaaaacaaaattctgtgagttccctgggtggtttccattctacctaattggctttcataatatatagtatttccacagtgtgaatatggggaaatcgatgtgtatccactgtgttctcatgaaaaattccatcatttcccattgtttaaatattccagtgtcttcgtccactaacctctatgtgcctcaaagacaaggaaatgagaaattaggatgatgtcacagtacacacagacccaagtctcgtgtgatatacacaaaatggtaaaaaaaatgtcttccatttacaacaccagacaagtaaaatagtttatgtacagattctctattttaaaattattactaattctacgtaatgaaatatgggagagaaaagctgcagccatgtgctttactaaggatacttagtaaaagtacacttaggaaaacaagctttctattctatgactcttttagttagttgaaaaatatacgataatggggaattaaaattaactctcctagcttacttaagacactcattctatgaaaataattagtttcttaacaaagcaactttactgaagatgttttttccacactgaagaagacccataaatgtatgactttttaaaattcttttcaatataatttataaattttttaccaagatacactatctgtgtccttctctctctgtctctctctctgtctctgtctgtctgtctgtctgtctgtctgtctgtctgtctctctctctctctcacacagacagacagacagacagacagagacacacacacacacacacacacacacacacacacacacacacacaccctgacagagagagagagagatagagaacagagatagacagacagcagtggggcgatgataaagcataaacaatggagttactaccaaagattaggaaaagaaagacttccacattaggcttgcccaagacttgtcttttcaattgtttggactagtggaggaagtatgtgcaggctcagaggactgatacccagaatcacacgtttgggctccccagctatcctggcgaggcactccaacaatggcggaaaccttgtgttcagaagagaaaccagcttgctaccagccactaaaggttccatttttggaactctcaagcactatgctccagagatggttttaattaatgagagaaagtcaattaatcccaccattctttccatacaaaccagaaataagctacaaatttggccaacaaagaaaatcaaatgagacaatgaaaaagccaatttgaaagagctagcgagtggaactggatcaccatttcaataaatagcacattaaaaagcttgaagcaccagaaatgaatagaatcaaaactattccacagcatactctcttatgaatatactatgagctagccagagctttatctaaaaactgcctcataatcagagccttttattgcttaaagttctccaaactatctatttttaatcaagaatcaaagtattattagaaggccatccatcctgggttctgggattggatgagtagcctgtcaatcacatttctgaccttagctatgtaacctagagcaaataaacttctctttgccatagtttttgctgtaataccactgtttcatcctgctcattccagaggtcaccaggtccatgacaaaaacacttccatagtgcaggatcgtgaatggtaggtcagaagccactgttatgcctataattaaactgaccatggcactgtctgaaaattgcttcctaaggctacaaggtcaggagcttctgtttgttcaaggaggatttgtgcctacaggggtgcttagcacttaggaatcactaaatgagcatttagcagacaaaaaagtgaaccaatcaccattgtgagcaatgtgtttcacttaggatctattcaatgaataatattattcatagtattattgtttattattgttgctgttgttttactattattattgctagcattattgcaattgggagccaaaatattttccaagtcataaaatggttaagaacacgatatagattcatcattgaactagggtcctgtgtcagctctctcactcccaccctgtccttagacccaatcctgccacatgattttaagacatggaagccaggtggcagtgtactctacaaagagagatgccagcccctcccatcacattctgggcttttaatgtctaattggtgcactttcagaaattcatatcctcaaaccaaactcatgttttaaggtcaacacagacaacaaaaccaaaattccttccccttttcactaaatacacaggaggctgtgacttttgcttctgttggaactgactttggacagtctctgggcccaggtgagacagcttgatgcaaatgtggcagaggtgacagtactgtcactacctgagaaattttctcatgcagtgatctgtgtcatggaatcacaaacacatgctagtgcctacacttaaccccactgatttaaaccagaaactatctagcccggtggtggtggcacatgcctttaatcccggcagggacaggcggtggaggcagaggcaggtggatctcagtgaatttgagagcagcatgatttacagagtgagttccaggacagccaaggcaatacaaagaaagcctgcctcaaaacgcaccacctccctcccccaatacacacacacaaacaaaccaaactaaaacactgctgtccattcattaatcaagtcccaagaaaccctgtacgggcttcttactatctaacaaaacattgcaaactaattatgcttatgtggggatagaagcataaacctcctcctggtcaggggatatgtgtgatgcaaattactcctaactaaagactactcattagtaaaacttaccacaactcaaatggatttgggttcacaatttcaaaagccaatgtcagtttacattctccactttagaacgcacaaacaaagcagagggagcagctttcatttgggaggcatataaatcacacagtagggctactggaggaaagcatccagaaataggaaaatccttgttggctgaactcaagaagtcaaacttcagtggggcagactgtttagattacaacatggaggctgcaaacagcctcgttttttgtaaggaaacagttttctgtgaaatattttacagcctgcattatgaaagaacccattttctcccccagcaggtattgccacagtgtgttggaacaacagcaaatgtgggggcaccttaagggctcattctgcttttctggaaatgaagctttcaagaaccacttgttttatttttactgtcacttaagtgggcctctgtgcaccagaagacaggtgctccggcaataaaaaatgcccaggaatatcaaattagcaggcatttgcacattccctgggtcgtgtcgtacagagaaagccaattggaacatttgactccagtaactggtcaagccagttaaacaggactttgattcaaactggtttcacccatttttgacactgaactgatcaaatgaaacttatcgagttggcagtgtgctcactactcgccatagggccttcacacccacacatgcaggcctgactaagcagctttcctccacctatggagccttggaaggaaaagctgcaatcaaccataggatctttgggaaaacagtagagataaaatagtcagaagaagctgggagtaacttgaatatgcagggaacatctccacattgtttcactgacaatcacaccagcaggctttgatggttgtgtttaatagctaaaaaggtgaaaagtcacatttccaccaggcagtggtagtgcacgcctttaatcccagcatttgggaggcagaggcaagtggatctctatgagttcaaggtcagcctggcctacagagtgagatccatgacagtcaaggctatacagagaaaccctgtctcgaaacacacttcccccacaaaaaacaaaacaaaacaaaacaaaaatcacacttccaattgctgtattgagcaacataccatgccaagaaagttctccccttcaatgtataagccttgagctgtacttataaaagtggatgggatgtgggtatcgggtacagaaggatgaataaaggaactttaaaaattgataatattgaaaacatgcagaaagatgaaatttgccatgttttcgctcacactgggattctgccttttaacattaaaaaagaaaaagaaagaagataataaaatacaggatgcgagaggaggtctaggctatgaaacttacagaccaagagaagagatccaaaggtgttcaggacaggatacagagtacaaaggaacaaacgtcacataaaaacagaaaggaggctctacaaggggcaggcgggcacaaggaagagacgggtgacaagagaacagcaggggccagagaacaatctttgtacactgcaaatgtgtattattgtcattgattaataaagagctgaccggcctatagctgggcaggaagagattgggcaggaaagccagactaggcaaactctgggaagaagaagaagaaaggtagagtctcaggagttggcagccagatgcagaggaagcaggatgtgtagaaaatgagataacaacccatgagccacaagaaggaacttagataagaagtatgggttaatttaagttgtaagagctagttaggaacaagcctaagctatcaaccaaacacttataattagtaataagtctctgtgtggttatttggggagccagctgtcaggatggagctgactggtgggattgaacactctgctccaacaacctggcaatggtgtccatgggctaaagcacatgtccattaattcatgggttttcaagacacatcaaaaacatataacaaggatgttatttccactggtatacacctcatggaagaggttgaagggagaactctgtatttaagttttgctaggtgtcaaatagttctagaagctgcaccaaggcaattgaactaagcagtcagtgggttcctctggcaagagctcccagacatagcttatgcaaaaactgtgcctaaagcacagacagcactccaaagcagaggccatacaaacagaaaatcctcttcaaaggagctgctggtgagtcttgtagcaaggagggtgtgccaaaataataaatcccccacaggccccaatagccaaagtatctgtcactgtcttagaagacatcctctacttatatacaactgatcctcaattagaaaacaattagctggccatgctggtccctgccagcaatcctagcacttaggagttaaaggtcaagggcatctttggttatgtaacaggttcaagatcagcctagctacatgtgaccttgtcatttaaaaaaatataaacaaaaataaaataaaaatgagtaatttatttctccaacatcacaaaatatgtagtctaaatgcaggtaaaaaaaatggtctttattttttcatttattatattaaaaaaaaaccgtgtgtgtgtgtgtgtgtgtgtgtgtgtgtgtgtgtgtgtgtgtccatgtgccacagcacacacatacaggctggaggacaatgcaggaatcaattctgcccttccaccgtgtatcaggtcagtagtcaggcttggagacaaatgccttaaccctgctgcaccgcctccccagaccaggaaaacagacacatggaaaaaccaagtgcatttcaataccattccatccatttgtcacaaaattgcttgacgtagcaaccaatatttgctgtgtgcattactgtgtgccagcaagtgctccaaatgctttagataaagttgctgtgtaagcctcacaacagagctagcagacaaaaagtatttccatccccttgtcctgcttagcttttattgtctacttggcacagctgagaaaagggagtctccattgagggactgtccagttcagtctgtggccacatctgtgggagtctttctttattgatgtgggaatgcccatccactatgggcggtaccatccctaagtaggtgggacagggctgtctataagaaagctggctgagcataatcgagtcagtgtgtgtgagcgagccagtgagtatgagtgagccagtgagcagtgttcctccagtctgtatctccaggtatttgctttgagtttctgccttgatttccctcagtggtggagtgccacctggatgtgtcagctgaaataaccattccctcccctacactgcttttggtcaaggtgtttgtcacagcaacagaaaccaaattagaaccgaccctttggtgggtaatagacagagcactctataattcaccttttaatgatatatcctacaagggactaatagcaaactactatgcaaatatcgtcttatgcagctctgaattttaaaggctacatgctagcatgatgtggagtgtggccccatgtacaaccctgtttgtatatgcttggtggtttgacctagccccatcctttcactttctttttcttccttgtagccacctgtagatattgggaacaccgtggggaagcagagccctcagggttgtgcttgacagcagccttcaccccaaaacgcagagctggctttcacataacacactagctccatattaaaaatgtatttctcctctgaccctcaagtacagacatagaattgactttttttctcttccatttcaaggccaataaagaaagacaaggctgagaatgagaagattctaagtaatatataaacatccggtgcatagacatgcaccaggtggggaagagaattgaattaacaaggtcaagacatgttacagggagccaaccctattattcacgagcaacactgaacaacaaattctctaagaacagcaaaggttctgtttatgctgggtgattaaaatagaaaggaaaaagaaaacccaactacacatcagtttaacactgaaaggagaaagtaatccttatccaatcagacttcaaggccagccatgctcctcttcaatcccaggatcttagttgcctgcatctttactgcaaccagctctgggctattatttcactgagtaaagcaggttttcttgaaataaaaagtgcactgatgccttgtttaattttcaagattgtaaacggggatagcatattgtttgaagctttggggagacactgaggggcagagtctgcaccttacagtcgggagatgctggggggccagagtctgcagcttacagtgggaagatactgagtggggggtgggcacagcccatagctaaagcacggatgttccctccaccacagagaagttggaatggggactctcaatccttcactctgtcaagggaaaaactacagatagcactgagggtcaggtaatcagcttttaaaaacattcccttcctttgtcgtccaataaagaaacatctggaactgtctgctttactctgagcagtcttaaagctttccagtgaaggaaacagggtccaggaaggaatagaaagagccagtttctttccatgcttcctctcttcctttctccgttacaaatcccactttccctggagagacagtccaggaaggtaagagagtcctgcctcctctttagtcctgctaaaggcataggtctgggccatcttggaagcatacaagaaggtggctggaaataaacatccttcacactgatcaggtgggacaatcatcaggaggtgctgagagctctcagtggacagctgtcgcctcggtatctattccttcttttgccaggtaattgggccttacctccaatttgacttccagttttccatagcatcacaggtaaaggtattaattttgggtacatgcttaattaatggctgtaccactttttttttttttttttgcacactccctgggttcctatctaagtgctggtaaatgaaagcataaaatagtaaggaggactatctgcaaggagcacacctgctgatctatagatctgatagaataaacagaaccgtgagaaaaaccacaacagatcccccccagctctacacaaaacaatgtaaaaatataagcacagttgtcaatccctcaatcatttctttctttgcctgtggtgatgtgactatctaattccacagcaggaatctattaattataaactagaagctcaaatctgggccattagctcttaatcacaaggaaatataaagaagtttcatgctacaaacactaacggcgacaaccttggcagaacaggaaaaactggaactgtccttgaatggggtctgcttacagaattttccagcatcgtatctgtttgtctctgtgcccttttactggctctgaatattctgggacatctataaggctaccctgacaagaaaattaggaactcctcagcgatacaatgtctaaatccaagtgaggagtgatccctcccccatcctcacaataagctgagctatcacagatgaagagaatcaggtacaaggaggcaccttctcaatcatctattcctcctccttaattacaaaacaggcatgagaattcaggagctatgaaattaattatttttttgaaaaacattctgttcaattattcagtgtagagagtaaatgattaaatgctaccaaccctccattttcacagctctaatgaacattttctgttggtgtgtgtacctgacctaatcagaagttattatggaaacaaaatgcagctgtctgtgcctcagtatccaccaggcaacggttcccagagaccaaagtccgtggagaccaaaatctgacgatgcacaagtttcttgggcaaatgtcacagtgttcccatgtcacttacctcccgcatactttagtcatcctgtgactacttatgttaccaaaatgccatgtaaggctgtccagggaagtgtctgcacattttcaaaatagaggatatattttccttttaggatgctgagcctgctatctgtaggatgctgatgggacacttcaacatccaagaagatctagattttctggtccttactctgcagcttactgaattaagaagcagaatctgcagagcagagtactacattttgtccttcacctctaattaacaattagtctatttgacacaagattgtccttttctttataactcatcaaactgacatcaatacgcttatcgtactgtgacaccaggacaggagaactgaactaaaacttccaatattttcatctgtccaaacagactgaaatgtgtatgtccagagcatcccaaagatttcccatatgttttcccttggcttgctactatctctacattttcttcttaaatttcactccattctcccaacttagaagtccttgccacactggcattaaaactatacaatgctcatttgtgtctagattctttctttctcctaatgactgtgtatacttgatttgaaatgttacacggtatgaaacagaaggaatacagactatgaactactccactgcaatccatctttttaatactcttgtctctaatagatcatctacttttacaccatactaatttatgcaactgactgcaggtcagtaatctaaacctcccataaggcagaagtgactcttattagagagcaatactcacctaaaaccagccttagacatatatcacagactaaacctgtctgaaagaagagctcacctttctcctcctcctcctcttcttcttctctttggcagcttgggcctgcttgtgctcccaaaccaggttggtcagattggccacatactcatcggtctgctgcaaaaggtatgctaagcgtctgtctttcttttggtcaatgagtttcctgtagccctcctcatcttcagcctgttcaggaaggagagaaggatgacagcatgacctcctggacactcacaggtccacttcacactcctctctactgtgcacaaccagaatctggtggtgcctggggccaacaggatgagctaggctgcaaaagctaccagtggaatctgcaagttggtaaatttagagccctgcaacaccttgggcccatgactctaaagtcagtagcataattatcacataaagccccactgcgtgtggggtatgatcaagcactgtaagtcagctctttcacgttcttctgtgcttcttgaactgctcaaaattaatgcaaaatctggtgcattacaagcctaggtgactagagacaagccatttagctccattaggttctactgagtaacaaaacaaaccccataatttccacctccacctcccattaggtaacacgatgagatcaagtggaagaaaactcttgatgtcctctgagccatttagagagaaacctcttttagatgtcccagctgaaagaacattctaaaatattttttctatggcacctgaataaaaggagaacaccatacaatctctaagaggtggctctatcccaatagagctcagggactcagctgtagggtatcactccagcatgtgcaggagagacagcagcttcatcactcagtctagctgctgtctgtcctgtgaatgagcatgaactccaatgctattataactctaattgcttttggctatggttgatctcacttgaagaaagagtgataaaaaaaaaaaccttcagtttctctattatctgtatatcccatcatttaattgcaaaaattaatgatttgcaaatgcttaatcactagtgtcaaaccaatctgttgctggagttctgatacagttttccttcagttgaatcagacaaatttgcctgttgattggtctgcttactatacaatagtctccctacctagagcaaagacttctgacagcattctccatcccagaaatgggggaaggtggtgagattttagaatgcctcaaatggtgcttattgtcaggagccccacccccagattaataaaaacaaaacaccaactgggaccccagcaaggaagacagtgtcttaagaactcttggaactgaatgcatgaggtgaggcttattctgacccactaaggaattctgtcccacacacagctctggtctcttatcacctgcacagttttgttacacttctaagtttcatggtgtgatctgtccaagtgcggacacaaatggtcagtaacacccaaccctcaggccaatgatctaaagctgtctgtgtctgtaaatcaattcaaacataactgcagaaggaaagatgcaaactaactttggggacaaaaagggtgccacaaaaaacctttgaagtgaacttaaaagtcagtttgagaatgacttagtaaatttatataataagtaaggttatgaatgccaagcagggggatgggagagaatgaatatgaatcttggattcaaagataatacccttgtaagctgttcattccaaagaaatcttagttgctcatctcaaaaatatcatacgtttaaagggccgcatttgccattcctcctgatgtgactgtcaaactcctgcacaacacagcgcttgcttttctctgagaagctatgtaggtggatgatgatggtacacaaaactactatggctcctcaagtgaaaccctggattattagatgcactgtgtagaaaagatgtactctaccctccagaagtgcaggcacctatctgtctgtgtgtgtgtgtgtgtgtgtgtgtgtgtgtgtgtgtgtgtgtgtgtgtctattgatacctcatgccacactctcaatgcagacaggcacaagcagaataccttcccagtctcatatggcccttaccatcagcctccgcattctctccttctcgatccgctctgtttccttcttttgctccctttcagtgttagcatgccaagtcgccactgctttggacagcttctggatcttcccagccacagaccggtgatactccttaaaatcttttgcatgttgcaaaatactgttcaggtattcctaaaggacacacaggaggggaagggatgctttgggtacactccccagtgaagtatcagctcaatggaagatgcagcatgcactgacttcactcaatgtccgaaatctgttgatgatgggggcctccctggagcctctgtagtacaggctatgggccatgggctagtgtgattgtaagcctaggaaagagtggctgccttcactcactccagggtgtggacattcaaaaatgggaagagcaaagactagctaggctatgggctggtgggaagaaagacttccttcatctgtatgttgtaagcctagggaagagatgctgccttcacctcaagggtgtggccatctgaaatggaacaagcaaggacaaaggctgacctataaaacatcaatgaagagatttacaacacattgttccatcaccctgaaataaatatgagggtgctgggtattttcagtgaaaaccacatttcttctgttccaacttaaatttagaactgtgatgcaaaataagtttatacaaagctgaaagtaataagtaataagtaatcctaatttgcttttcagaaggaggggaaatatgtaccctacttacactaaaatctttaacttttttttcatttaaaatttttttttcattttacataccaaccccaatccccccttcctccccaccccctctttctcttcctttcttccttctctccccccccttttttttttgcaaagaaactaagttaggcactagattaggcacaataacacaatcaggggacaaaaatcaaaccctacatcagtatttccaaccccctagaaaggaatgcttttgaagatctgcccctgtgaatcctctaactgggtccttcaaagaagccagaatactatagaaaaataacttcctgctacgtgttggagagatagctcagcaataaagggcacttgttcatcgtatagaaggtacaggttcgattcctgggacccacgctgttgctcaaaaccatccgtaactccagtttcaagggaatccagagctgccttctggcctctgtgggtatcaggccataaggcacacaaccatatatgcagggagggagagggccagtaagcagtgttcctccgtggtctctgcttcagttccggccttcagttcctaccttggcttcccttagtgagggactgtaacctgcaagtcaaataaaccctttcctcaagcaaagcagggcattctcccatctctaaaatgatggctctgtattatagaaattccacattacgtttctgttcaatgaccccccacatctcccatcccaacttggcaaacatcctgaccccgaccactgaccccatgggacacctctgaccaggaagggtatgcaaaggcttaaggacctggtgcttctgcctccgtttcctctcctgttctatcttctgctgcttctccagtttctccgtcatgcgcgcctctcgaagggtctggcgcttgctccgcttgtatgctttggagttgagggccgtctccagggtggtatccctccgcatgcaggccaccacctcctgtctcagctagcaggagaagggcagttagagaacccccccccccaacagaagccaggtcctgggccccgacctcaactcaatggaacagaaaggtgactcggtgcacttttgtcaatccaattgcagtgggctatcactaaaaacaagggctgcaattgtggcaaatttccatggtaattttaaagacattagaaatattctttactcataattcacatcaaaaacaattttagtactataacactaaaaaaaaaaagatgaggatgctgttctgggtttgaaataaagctattcatttcacttaattatatgttacttagttgataagccttttaaacttttttaaatgtcatagtatcattctcctgctgatctacaagaacaagagggttactgtctattcattttccaagtaacagcaagcagtaactccagtgatataaattcataactttaaataaatgatgggacttaacagtctgggtttcctccttctccgacaatgaggttctttagtattaaatcttatattatgacatggactagttttagattcttgtcataaacaatataatcacattacatatcatatggcagtaggtgggaacttggaggtctacattacagtaatgattcagttgaacctgaaattggcatcggtcccatctacccaggaaacttcatagaaaacagatttttcagtaacatcaaacaaaaactcgggagcagcagggctccaggacagggaatcacatctcataccagacaacacacgcctctaatatgcatctgacaagtctgtgtcaaacactttgttcattcctatgatgaagtttcctctaattaagatgtaatggaaccattctatttcttcttgctttaaatttaacctgaaatctgctctctggaaacctctaaacaagcagcatctagataccagatgtccctccatcacatgccactcagtaagtaaaatgcgtcttcaagttcatagatggcggccttgtgatttcagtcagacttttcaatggaccaaattcaacacatccagactatgctcactcattaacaattcattctgcatgccgcacacattagcacaaccatctgactgacagaaggtgctccttgtcccctttggtttagacaggcaatctggggatggggaccagtccactttgacaaaactcggccaagggaaaattagttcttcttcattccactacatgcctaccaatttagaaatcagaaaatagatcattataccagatctcaatagtgagttctaggagacagtatctcactaattagtcaacgtgtgaatgagtctgatgcgaccaagtgcccccaagttaggttttgatgaataattaagtaaggtacatgacactgtttttttttgtgtgtgtgtttctacaaacatgggctggtgattaggaaagagactattgtatcttctgtttctggggtcatggcttgctttgcacatttgggtttaccaggaggaacactatctatttaccgcctccttggttttccttggagccatgaaggcaagtcacagctctccataatctgttgtcatggttttcatccgaagtaccaaaatgcaataactgattttgtacactatagtacagaaggaaaaatgtttctgacatacagaaggggggaaagaataataagtagttcatactcattactttcggctacgagctgtcaatctaaagacacgctattttactaagttcctagcttcctaacaatattgagcagactcgaggaagctcgcagatcacactttaggaacaattaaattgatttcctacatcacggactcactggggaaaaggtattacctgacgctggaaattgagtaaccgaagtgctttcagttccacagttgctttggttcgtaaatctggtggcaaagagccaggcagactttccagttcttgtatcctatgagctatgcgagcctgcagtctagaaggaaataagaaagagggggatgggagcgggcagagatctacatcatgatttgagtcttcaatgatggacaacagctttaggtttaggttcacaaattccacacgatgacagtcaatttctgacatccaactaggttttcttttttaaaagaaaaaaaaagtttacatttatttacttccaggggtgcgcacgggggggggggccgcagcctggcaggggacacacgtgccactgtgcatgtatagacagacataagaggacagcttgtgaatgtcacttctcatgtacattctgggagtcaaggcaatagatgtctttatctgctcagccatcttactggggccccaacaggattttctaatgttaaccacaaaagaagctacttttgaattcctgaagacagacacttcatattctcgacactttgaacttctgtgtagcctctctctgaggcctggaaaggaacttcacgctacactgaggggacaggaggtgattaggaatccttgcttactctcaacagagagagaacacagaggcagtctggctagctgcccaactcccagcctgccatggcatgcaaagcttcagccacagttcttccttctgttctgaggtgacagtgacgatagtagccaaagcagggtggcaagtgctgctttaggagccgagaccgcagaaacaagccagctagagacattccgagagagccctgccaaccacatccacttcctgtgtgcagtgcttatttgagaaaagacagcaaactgggcatctgcaaaaattgggggcagcagtgaagaacgtttcctgaaaaggatgctggggttctcattttagacacgatcaaaaatataattgtaagtacttcctcttaataaggcagactagaaaataaaagacatcttcctctagtccccggctgctatggctccgactcatataagctggtttcaaggcttacttttataaatacatatcactgaaatctagttttagaataaactcctgcccccagctttgggacaaaagtgtttgagaatagaattgaaacgaaacaaattataagaaaagttagtaatgagttaacccaggaaatactcacttcactaagtgcatctaaagattccaaatacacaggggggggggcacacgtaaattcatgctagaaggccccattttactaatgagaaaactgaagaaacatgttgacagctgtactggctggccttgtgtgtcaactaaacacaagctagagtcaccagagaggaaggagcctcagctgaggaaatgcctcaatgagatccagctgtaaggcattttctcatttcgtgatcaatagggggccccagctcatgatggggagtagcacccctaggcaagtggtcctgggttctataagaaggtaagctgagcaggccaggggaagcaagccattaagcaacacccctccgtggcctcttccttagttcctgtctccaggatcctgccctgtctgagttcttgtacttacttccttcagtgatgaacagaaagactggagtgtaagccaaataaactctttcctcctcaacttgcctgttgctcatagcaatagataacctaactaagacaacacccaccacagagctagaaatggaggaatcaaaaatcaaaacctactttacatgaattattatccaattggttttcctccatccatctatggagctccaaatgtccaaataggcaaaagaagacttacatacatgaagagaaaacacacacacacacacacacacacacacacacacgcgcgcgcgcgtgtgtgtgtgtgtgtgtgtgtgtgtgtgtgcactcaaagaaaaacaagtaaaactgaaagaagattttacctttaaacccagtttgctttgtaatcttattatcaagaccacactaaaggggcttagctattacagtgctggtagatggtgtctcccacaatttcatcatgttacatccttggttctagacatcatgtgtctttgtcttatttggatatcctagaacctaaactccccctgtgtattttggttcagtatgacacagagagtcaagtactaaactctaggaatggtagcttctgattccaccttccaaaggacaggttctaggatgataaaaaaaaacatgactataggacatctgggctgacagtgcttggactaacccacactgaactgggtgggaagttggaggagagagaagagattgaagggcagaagtggggccggtggtcatgggctttgggtacctgggccactgaagcaggaaggagccaaggcttcacttctccctgtcatgactgcttctccaaacagaagtgatttcttagcccatcccaagagttcccaacacagaacctcttttttttttttttttttttttttttttttttttttatggaagagaggcagaaagtacaaagtgcaaactcaaggaaagagaaggaagagattttacagggaaatgatatgtacgcgatgtggcacacggggtgggtggcaaagttatgggatggggaaaggagggctgggaaagggttaacagaaaactctatccctgttgtttttgtgcttaatagaaatcttcattttaaataatgctcctctccagacaatttcatcttcccatcgatgggattcagcaggaagtccgataaagagagtcaggatggtaaacttcccaaaacagcagcaagatgtaatcctgcctgactgcgggagactcatttagtgtcctcacgagcacagaaaattgaagcagaattaggtcactcgggtttttcatacagtctgaagagtaaatcaagagaggttactgttctggcaaggcaaagagttccattaaaggcaacagatatttgttcaggtccaggggagaagtttatgattcctgtaggagagttatttgaacagaaaatgacactggtacattttgttccttcaaggagctgagtgacactttaaagagcggggaaagagagaaagggaacatgtatgactttggtgactcttctggcagagtggctatcggtaatttttgagaaggaatttccagggttgtgatggtgcctagggcaagacaaggaatcatacacacacacacacacacacacacacacacacacacacacacacacacagagagagagagagagagagagagagagagagagagagagagagagagagaggtaaactatacatacatgtctcttagaaccgtttccacactcaattcttgtttgagaccagaggtctgatataattcaaagatgactttctcaaataaacccttctaagtgtgaaatgcatcttccatgcaagtatttgtttacatggaactagtttccctgtcagcatgtaagttcctggagtgctctttgattgaacatggaagaaaatgacttgggaatagaagagtcaagaactgatacccaaagatgggggctccagggtgaggggtgactgcagcacacaaagctgataccagagaaagaatacatttttttaaaaaaaaggtgagccaaaaggagagcacccaatctaaaatggaggtaaatgttttcaatccgagggctgaagatctgatgctagtgtgtacacaggcagaaactgacttcagctataacccctcctcccaaagacaggttgatgtgttaaaattctgagtttatgacaaatcagggagaacagccaactggcttgaagaaatataacacctgagtaatttctttccatttttgtagacaaggaccgtagtcaaagaaatgaacatgttacaagattcatgttacatattttgttctgtcaaagcctatgaaatcccaaaagagatctgttaggaccttactcaaatctttgcccaggtgacaaaggtgcactagccaggcagagtctagtgagcagggggatgtctgctggcctagcccatggcagggagtgggctagcccaccacagtgggcaggagagaaataaatctaatacctgtccggtataagtgtgtgagagacttaatgaaaccccttcgatgataaacttaatctctgcggtagaacaatgtctttataaagccagctattgttccatgactaaacaagataaggcatgtccctgttatgctgccagcacaatctcatttttccccagatggccatagggacactcaggccaatggtcccaccaggcttttggcaaccccaacaccttgcagctccagctttacaaaagtggatgtgcttatcaaataataatgatatgaaaaatgactattcaataacattctgaaatgcacatgatttttaattgctttattatttatttatttagagatagggtttcactacataccctaggctggccttgctctcatgattcccttgccagagcattccatgtactgagattctaggcatgcagcaccatgcaccactgtttaaaagaaactggtagatataatttttattaacataggagaatggggtaggtgagatgatagctcagatagggaaaggcacttgatcgtgagcttaatctccagaaaacacatagtggaaaggaaaagagcaaactctcacaggaccatacttgtgaagtggcacagatgtgccataaataaataaataaacaaataaatagtgaataaatacaataaaaatttattataggaagatgatataggttacaaactttttaatacattgaaatgggctttaaaaagaaagtgctacttaatactttggaagataatccattaagctcacacttctacaaatggctctaaaatgagattgtaggaaagccctgtaattaaaattctggcaataatgacaaaaaatttaggagtccacaaagcattttccatgcacacatatggacatgtatgcacacatacacacacacacacacacacacacacacacacacacgagactaagagaaaagccagatgttacaaaaaatgtctaagtacagagaatgtcttctgagggtacctgtcatgagacaacaaagttcccagcatctttgcatcttctgggcaaggcaaaagcatggtagatttcaggcaaggtagagtttcagggtagccacacaactgaccatcccctaacaattacctatgactttctttactcaacaacataaagaagatatggcatctgaggagcttatcttcactttatgatacacaaacatttacccaacagattctgcctggccccgatactcaggtgcaggagacaagctgggaatgataacagaaattctcccaatgatgactagtaacagaagtgagaaaatagactcaaagtcccactccaaaaggggacccacatctaatacctagtctccaggatgtctccaaaagaagtctccaaaccagttatattttatttaatttcataacaggctatattccttttaatgaagataaaggtagtgcccttaaggagaaccctagcactgcttactggctaatgtgctataatttttaacatctagttttattttaatccaagtaattctacaaaaacaactgacaccaatattactgaaagcttccaaaatatattaccttttctgacatgttaagtcacagaaaagtaatgtaacctgactaaaacaacagagatgtgtctgacagtgtgtgcttccaggcaggctgcagaacccaaaatcttagctttgtttcagcttaacacttactggactcagtatttcgtggttgttagccatttgcttgagtagtcttctatataaagcctgtgggccaaatcttgtctacagttgcttttctaaataaagttttaattggaacaaagccaagacaccacagtctatgggtgttttcccacaaaaagggcagagctgactatctgtgtctaagacatatggccctgcaaaacattagatgttttccatctggtccttttacaggaaaagtttgccaatccctaatttagatacaactgtgtcaaatcaggtgacaagtgtctggattaggagtttaactaaggatcccatttgaagacagagacctagggctaatccctaaagctgggtcaacctctaggctaaaacgagtaaattaaaacatagaacacattatacccatctatacagtatgctttttactaccatgagctgggccagtattctgagggatggacacaggcaacatactcaacatgactgtcttggtcatcaattgttcaagaacacactgaccatcaaggacaagctattccatgattcaagcctgagattgcccaccctgaaattaaggaacttaagactgggcttttgatctctgcattcccagcacctggcaagtggatgggaaggataaaggtttctgagtgaatgagagagaagtcacagttttgtcctactcagcatctcgtaaggacccacccaacaacatgtgaactttctctacaactgttctgaagtcactgtcacagcatgagtcctctccgatctctcttcagccctcctggtgtccagtactactaagacactgccccatggagcaagtcagtcagcccctggccctggtgatcccatggcttgatcaccagcagtacctgtactctcgctcctgcaggatctccacggggtcgaggccttgcggtttctggattgggctgatacggctctgcttctgttgcagctgcaggaccggagacggctgccctggggcaggctgctgcaccgagggcccgggcacagctgtggcggtgggctgggcagcggctgggggtgcgggcgacggccggccgctgggtgccggtgctgacagcttctgtggggtgctttggccactcatcagcatctcttgcccagggcctgtgaaacaagagggacatggacaggacaggacagaaggaaggacacctgttaagcatgcccggctcctccacccctcaaccactacctaggaatggagaccaccaatgtcttaaacaccagagagctgactagtggagggtacaaaggaagaaaaggaatgaagggcagaggtgaaagagaaaaagtaatctagcgtataccccacaggcaaagggcacgcactaatgaatattgtcaaaaacatccaaaaaaatgacccctggttataacaaatcaagaaaatgagaagctggttcttaattccacattctgcagtgggttttttgtttttcaagaactacgggtgaattcaaacttcagaaaagagagttccacaacagtcagatgcaatgggtgtggacctaaagtctcactttggaaactgctactaaatccctgcaaggcaggcctctatcccaactgctggtgctggctagaggatccaatgctggttataggatcatccaggatctagtgttggctatggaatctagtgctggctgcgggatctggtgctgattatgggatccagtgactagggctatggtgctcactagggctataggaactgagagactcactttcccttagtggctctgaaagcttacttcaggcttactgatagtgaatcccaggaactaaattttactttaattacagagtgtcaaagtatttctaaaactattcaacatttggggtaaaatatgctcatttcccctaattaaaatgagcaaatattaaagaaggccttgtctcccccccccccccccccccccccccctcgtattataagacaatagcattgcaatctttatcctttcttggaagcttggtgtagtggcatagacctttaattccagaacttgatgggtagaggcaagagaaccaacagttggtggccaacctgggttacaggagagcctgtcgcaaaaaaaaaaaaaaaaaaaaaaactttaagtattattgaattcagtttcagctatttcagctatttctgcattaagcagaaacttcaattacctgctagatacaaatctaaactaagaagagctacaactctcctccaggtgagttctcagtttccttacaattaaataagattgctgaagctacgagatgagttagcaatttttttaaaaaattagaaataaataaataaataaataataaatgaagactctcagtcagcagatgctaaaaccacaaacaggcattcatccaagtatttcctatatccttcctaaggaaaaaaacaaagccattaaacacaaaaatcagtctcagacttcagagaggcacaacaattaaccattatggaaaatggaacacatttcttcagtttctgacaaatgtcatttagaaaaggacttaaatgacaattcagagaaagccataagcaaacattgtgacataaggaatatgaagaattagttcaaacttctcagagaagtgtcagtgtgcatatatatgcctgagtgtgtgctgtgtgccgtgtgtgtgtgtgtgtgtgtgtgtgtgtgtaccggtacctctatcccaacagctggtataggctgtttttcttccctcccaacaattaggtaaaattccccaaacaataaagagctaaatacattttttttcttaagctaatttgcagtcttggtcttcttgggggtagattaaaaagcagttctggggtgaaatgtatggctctttatttttatgtccaagatgtaccatcatataaagtgtttttttttaaaaaaaaaaaaaactaaattcttgaagttttgttttctgaatggaagatcttttacaaaatgcatatatcttcattacatgttttatttagaactttttttcatccatgtttaagaaacttatttctaaacttcaaagcccaaggttattaagtactggaatgagttatggggggggggattggaatacctttccctggaggaccctaaattatggaatgattttcctttgcattgttttatgtgtgactagtcaaatgactgacacgtatctttactttttggtaacaatgatttatttatggaggggggacatgcatctaacagtgcacatgtggaggtcagaagacaactttcaggagcctgtcccctccatccaccatgtgtgttctgagagtcaaaccagtcttcagacttggtggcaagagctcttacccactgtgcaaatagaattaaatctattaaaatccagggtctaggtatactaatgatgaggttactacttttagattctcaaaatacaatatttttcatgacaagagactttggttgttattggcaaaatagtatcacaataattactttaaagtccactgtcaaagtttttcccctcttctctaagttcaaataaattgaaacgtccaaagggcacagcaacagccgacactcacaccttgttccagtcctcaccaccaccactaagccccttccacaacatgactgcctagaaattcagaggcacgatgcagaggtctaagtgacctggaagttcacctctcgacaaggacaaatgacaggtattctactaaggtatatctcataaactaaatagaagcctcccaaaggaaagggaagtgttttgcttttatcttcacaggaaaactcatcttcagaaggcaaaagacactacatgggtagatacttaagaagaaaaggtagctataaccatcaaatagaaggaatgtgccatacggtaaactttacagctgtctctcaaaaaactctatttctctttatttcctagtccctattcaattaaaccaatgctagacttagaggtggatttggctttcctcctctaaaatccaagcacattatttaactaagctttagtgtttctgtattatatcaagaagccaattgatgtaatacagaataaaagaagaatttggggactgtctttgtcttttcttggatctttctctcaagatgtacaccctttcataattgttatgctctcatggttacattccctagcatgtgtacatacacaaacaaacatttctctgctaactgttcatgtttgagtcccacacagccaataaagacctgcctgacagcaatccctggacaccctggaaagaaaatgggccacagctcctcgactgcactggatccaacttgctccatttcagctgacactccggccagaggttcgggtactgacttcaatcaagttgaggatttcaagcgagatcttcaatcaagtgaatcccatctaacatggactggatactaacattttctttctacaggaccccacatgactatcatcgtcccatttcagcaggaagtaacttggaaaatgctacgccccctttccccattgttgtcacttaggatagtgtatatacctagttaggaatagcttcctattgtttatgactttagggtttagttaaaatagatagttatcttcttatattttacctttatactgttaagttttaatcctcttttagactaaaaggggaattgtaggggaagctgtagccacgccttcttaggggctggctacaagagtacctgagggcttgtgagggcgtggtcagagtgagtagggggactgcgttttcagtttcggtttctctttgcttcttgctgtacagactaccaccggctggctggttcgctctgtaagtaaggcttttccctattaaatacccttatatttctacctgactccgtattggtaatttcttactatagggcacagcaacagccgacactcacaccttgttccagtcctcaccaccaccactaagccccttccacaacatgactgcctagaaattcagaggcacgatgcagaggtctaagtgacctggaagttcatttgagccgcagtttttaaaagtgtatttaatccaagaaaggtgttatcagctggccatttttagtctgtatatctctaaacaggtctggtgaatacctggtcagccatatgcaattaccacatgtaaagacaatgtaatctgttggattcatccttaagattgggaaacagaaacccaaccacggacttgtgtatcccagtgtctaacaatggcactgggaggagctagacagcacttgctcctgcagagcacccaggttcaattcgcagcacacatgtggcatctcataactgtctgtaactccagttccaagggatctgataccttttctgacctcttcaggcaccaagcatgtacacaattaacatacacacaggccaaacactcctacacataaaataaaataactctaaaaaataacataaagttgccaaaaaagaatattgtcttagctctatcacccactggctgtgtgaagctgaccaagtcaccaagccctatgtctgcttcctcatctgcagaatgggaacaataacaataacctctatctcatacagtggtcacgaggactcagtgagattgcctgactatatgttcaacttttcatccttactgatcaaggccagggagggaaaagtctaacttaattactgtatgccacacaacagagaaccccatggtaaaagaaagcacttccagaatttgggtgccatattagctggaaacttgcagagtattcttttctgggccaaatttcaaaacatttctgtagtttcctacaactcagcacagatgctcccgaggcccgtggacttgtcatgtgcaccctgccagctgctatcagggccacttacaagcaaaccattttttagctaaacagaaatctatctactgtgtggtctgctttctcctctctctgactgactgtataaatactctcattgacagagagcaggaaactcagtgtagcttcgggcacttatactcaggatgtgagccccctctagcaggttctgtgcctgttgggcaggagatttacagacagcactggactccggcctactgtgcaccagacaacctgtggttgtctacttcaggcctttcgccacactttcaaactgaacacaaattgaatttttagctcatctcttcccctctctctagtatggacaatttaggcttatggtcagtattcaaaatgccttctgcctcagcccttaccttaaggagtcaaaatggtggctgttctgcctggctctctagaatgtggtcccaatagtgctgggggtgggtaaatacatcccatcccatcacacctgatatgaagtaatagggcaacacactcactgaaatacccacggctcacctgcacagcgtttccatgccttctgaggccactcagcacacaggataattatgcaaatcaccactctgcactaaatagtaatgtgatttctacaggttgggaaaaaaaataaatgaagtaaagaatatttaaatggagcatatcaaaaagtttcagatgccaaggttggtggaggggcaagcattaaaggtggtggtggtgggggcgaccattttcttcttttaccaccataagatctgtcgttccctcacttctccaaaccacaactttctcagttctcctttttattctgctttaatccctaaaaggaaaagagaatcaaaacgaaaagagaaatgcgccttggtctggagttctgcccacaagagcaaggacaaggctctgcttgagaagtggccaacccccccacccccacccccaagcgggagccttctccagcacacttgctcagtgtccagggcatcctgctagggaacaatgtcacttcctgtgagttctgctctggggtagatttggggaagaccaatccagctctgtaacacattctcttctcgaattaagtgcactaggaaatggggtggaaacttaagacctccagacggagtgcatgtactgaaatgacttttcttcctgaaagattaacagggtgtttatgagaaaatgtgttgttttttttttaaagaggggaggggtataaaacattagtcaaatttaatattgacttaaaatccttgtattatttaggcttattgtaaataccaataagcacaaatgccttcatccaataagtttgtctgtcctatatcagttttctgcatgagttttgcaggatggacactcccaacagtgacagggatatgtcattctattggggagagagccttcttcccctttcacccatggccttcttgcccacttggccagaaaacatcgacccaactgtttccaattcttactaagcatggcagctggaaaatgcaaaagacatgagcagtaggtaataaaatcaagtccctttgttgatagggatgtgacaagacaggcagggacaaggaaataggtaattaagaaggtacccctcctctggaaatggtccaaaatgtatgcacagttgggttcagtagacgtgaagtattgttatatgaatgtactcatataatagaaactttaccctctaaatttcactacttcattggtccacattattagacctttgggtggaaagccttctcagatgaagaatgcagcatcctacctacctactgtggaatgctttcctgctgagtcgaggtcattgaaaagctactaatgcctttggaggcctatgacatgacaggtgataccccaagatagggcttcatgcatcatggattatgtccatatgataaaatccataatgttacctcttgggaacttcactctgttccctcctctctgcccagctgccagctatcttgctgtaagcagccggcctctgtgctcaacgcggttgttaaaaccactcgtgcactaagatgtgggaaacaaagatgaccaattctgttaagagtgtgttcagagtaaagagtgaaaagaagtcatgacaggttactgcggtcttcacttttcacgcacaagagtaaaaaggtgaggcgcccacactttgcagatgctttccctggtcttgagaactggggtcaagaaggcaccctttgggacaaacagtcaagaacatgagcttgcaagtcacaactgcaaggatctgaacctagatgccctccatgcagcagagatggcatgtgccaaggatgttccagagcatggatatgcaagcaggttctcagtgagactaaaactacgtatgtataaaggctttccttctgtttggccgaattctctagagagttttacagtttaaaagtctattgagggttcaaactgtcacatccctgcatggagtttggggagcccttaccagtcatagggtctggtcccatattatcctccatctatcaaaaggttccctgctagtcacacagaaatatgggtatgaaataatattttttttctttaaaaactcaactgctaaacagatagtgctgctgtatgtctgtaaccccagatctcagagaaagaaagactgctaagggtaccaaggccagtcggggcttcaaaggaagaaactgtcttaaatataacacaaatacatacatacacaaatacatacaacaacaacaacaaaaacccgcattgctatatgctaaatgcttgtgtctccccaaaattcctatgctagaatccaaatcctcaaatacttggtattaggatgtggaggaaattaagccatgaggcaaagctctcttgaatgagaccagtgcctgtgtgagaggccacagatagctccctcaacctgtacacagtgggacggtacagcaaaggtgcctcctaagacccagaaagcagggatgctccacatgctaaatctgctgacaccttaaggctggaagtctcagccttcagaactatgagtcataaatttcttctggttttggttttggttttggttttgtgatagggtctcatgcatcccaagctgggattcaaactcactatataactgaggatgactgcagcctcccaagtgctgagatcacataggtatatgccacagctggcttaaaacatgtgaaatatgtaagtgagtgtgtgtgtgtgtgtgtgtgtgtgtgtgtgtgtgtgtgtgtgtgtgtgtgtgtgtcagggcatgtggagggatacatatccttctctatcatcctctgcctcattcccctgagatctccaactgaatacagagctgggctggcagctgacaaccttccggtctccctaccaatccctcctctacggtacccagattacaggtgcacacaaccacagctgatctttacaggggttctagggacttgaactcgggttttcctgcttgcacagcaagcacgcttccccattgagccacctcctcagccaaaagactcattcctaatgctacatctacaactaacagcaagagttcatcttcctggtatctctgtttgaaactaaatctatcagaaaagaaacacaaactcaaaaattaggacaaaataaaacaaaacaaaacaaaaaacaaaacaaaacaaaacaaaaagataccaatcagttcctttctcctcacccgagttcctaaacctaggacaaatatcccaaattcattgttctcacagcaattagcttgtcagtttgccccaacgactaaaagctattcatgggagatggcatcagtgtcagggagcattacactccccacaatccaaagcgctcagagctaaaccatagctgtttatccagctctttcaaaagatttaatcaattgattgattggtgagagaaacgggtcatgtatgccaaagcatgggggtcatgcatgtgcagatcaagggacaattttatggagtcagttctctcctactacttttaagtagggtctggggatggactcgtggtccatcaggcttgcagagtaagcacctttaccgaaagctatcttgagatgcatgctagagatgcaaccttcatagaggagcagtctaaagccccgtgtacctccgagttctatcaacctgaacaggtcatgtctccaaaaggtcatgcaagggactacatcatcaacacctgttgtgtaatcatagcttctcattcttacccccagagagtctaagaaacaggtcatgtgtatctgttgccttgccatgaataaatgttgctaatgcttctctcgtgcaaagccttttacaataataacaacgaaaatacaatgatggtcaggtttccgtatctgtgagtcccaaccctgtgaattcaactgaccacagaaagaaaacacttggggaaaaaaatgtaactgtactgagggagcatagacttctttttcttgtcattattccctgaacaatacagcgtatcaactattcagacagcattcatgttatagtcaatatttctcataaataacctgcagatgatgaagcacaccaaaggatatgcatagcttaaatgcaaatgctgccgtgcatttcatatgagggacttgaacataacagatcttggtatccgctggggtcctagaagcaatctgcttcagacacaaggaatgactgtaatttgaaggataatcacacctgggagatctactctatattctcatgccagaaacggctttgtgtcctctgagaaattgggaagcaacttccttctgaatggtgagaattagatacatgaccccatctcctggtggctctgtcagaaaactcaagtcatctttgaagctcagccacagcaactgttggggtggggggctcttatgggctccccatccctgacctggattcttgctcctttaaaaaaaaatgttccacgtttctgctgctttatttgataatttttttacaacaggtctcatcaaatgcacaaatgtttttttttccccaacaaaaagggtaagaaataaataaatgaacaaatattgaaagactcagttgggggccaatttgagtggggagttctacagatggatgcagaggaaacagaggttcctaacatggagtatattgatgggcttccaggcaaccttgtacctcttaaaagagaatgtaagatcatgggagaatgtgcttttgtgctttctccctagattcccagcttgcaggagggtctctgattaagaaacgctgctctgggatcctttatgtcaggaaccaagaattacagcctatctcagcagaaccagaagacgtatagaaaagggttgggtcaaccggggccttctaccaacctagtgcgtctgtgtgctagaggctgcttatccaagctggactgcagtgatactcatttggttgtgtattaacctaccagatggtctgttgtagctaacaagggcaggctgctgctgctgcggttgtggctgcgcctgctgctgaggctgctggggctgctgctgaggctgctggggctgctgttgctgttgctgctgctgctgctgctgctgttgctgttgcatgccaggcaaggtccttttcccctggactgcaagctgcagggtttcagggaggggctggcccctggccaacattttgtaagctaaaatctgagctcgaagctgatgcagctggacaggactgaaaggcgaaggacctctgttaggctggttcatggcctgcagatctcctgggatgagtggccctggctggctcggtggcatctggggtggggttgggcctcctccagatatagggctggagacgtgctctggggctcccaaaggagaaggatgtggtgacatataacctaaaagaaaacacaagatcacaggctgcagcagatgactctgagagagacagaggcagtctcgaatacgctaataatttactagtgtgacactacatgagagaaatttaaggtatggataagtttataatgacacatagcttagaagtttaatctagaaaggccgggtgctggtggtgcaagcctttaatcccagcacttgggaggtttaggcaggtggatctctgtgagttcgaggccagcctggtctccagagcgagtgccaggacagcctccaaagctacacagagaaaccctgtctcaaaaaacaaaaaaagaaaaaaaaaagaagtttaatctataatatagcttatctataatttaaaattaactagtaagcacattaaaaaggtcaaagaaacaggtaatggtaatttcttaacagtttaacacccacaagattagcacttcaaaaagagcgagagttttgtattcttttttttttttcataataggtaggtctttgaaacccagcatttcatgctcatagaacatcttgatttctctagcctcatttcagatgatcaatagccacttgcaccccagaaggcacactgtctgtggtggttgcacacctgcaggaacgaagatgaagggcagtattctacatcagaggtagctccaagctactcagcaaaacatgaagaggcctaaagtggctttgtgcagaataaacagtgtcttatgaagaaatcaaatattatttgcttgatgatcatgcaagctgtgactaaaaggcaattaccaaggccctagcactgcagttactgtgccatgactgtacacagcatctcaactgagtttcgtccagaaacaggctgagccaaggactgaatgcaggtaatttatatgggaggtgcagggacacttggaggagtatggagaggtgatatacgggagggaaggtagccaataaaaaatgcattaccaagccagctgttgcagcaagcctggaagatgaatccactgctgaagctttgggacacaagataaataaactacctaccattattctagggaaggaatgaagaagccggggtatttaaactcctacagtatcagtcactggttaaatcactagttatcactaatgctctgggggccatctgtgttcagaggactattccactgtagataaggcaggtgtcaccaggcagaggagaatcaagatgatgataccagccaatggacatgaggcagatgtaggcacagaaatggcaggaagacccaaagcatataaggaagagcttagattgttatatcaatcttcagcacatctgtctgaaggcaaatactgttacctcagattctaaggtaaggctgcgaaggctcagagagtgagttactcaatgtcacaaaagtaaatgcccatagctcaggtttaaaccaagcctgtctggctctaatgcacacactaaataatagaatctacattttgttatgtcaaaataagtcaagcatttaaagtttcaaaatctcaaggcataactcctaggatatcacatacaaatggaagccaccaatttgggtttaaaataccaaactgaggaaatgaagaatatttttcttaaggaagaaaaattaaaacacacagacattttggtgggggttatttaagaaggtggcgtgagtagctgagccaaacaatacccacaacctatgactgggtgttgttgggagggagattcaagatggagaagggaaccaaggggatactgtaatcaaacagctgcctcgagtacaaacagagtaccaattttaataaagtaaaaggagtccccaggcagaacaggacaaacatacatgaaaagacttgatccttcgatgaatgtgtgcatttggcagttatcataaaggtcaccacaggcctggttacaagataaaagccatgtgtttgaatccatgtctggtctgaataaaagagctgcacagccacaaaggtccataggtgggtgaccctcacacaccatcacccttttgaatctcagaggaaataagtgatacagttacttttatctgtggttttgccatttggagagtgatcaaatttaacatgatctcccgataagaactggtgttcttctattgtttgtaaagaactggaatgccacatggggaattgctaccatggaggaagactgctaggtctcaatacccaaatccctacatcatgggggagcatacaacaccaggactggggttctagttagttgtaagtgagccacagaaatctccctgaagccagcctgttagactaacagaaatattccaacatatcgctatttgtaacaagaatagggaatcagtaagattcttaacttttgctattaatatctttccttgttaaggaagctgacattcacctcttaaaggtaagctgatacaaaatggttgttgttcactacacacctttctttccaactccaagaaggaaaactttacctttacagaaacttattctcatagtaggaaggtataactctgggggttaagatgagtctcttgctgcccacccaacctttctgtttcctaaattgtcgagtataatctcatccacaagccaaagtatgcctgatacaatggactaaaatcctgggcaaacccatagaaactcaactgcatagtgtggcttatcaaaccactcttttaaatcatgaataaggctttgctatgaggttgagtcaagagcaaggcaatgatgcaaggatgagacaattgcactgaagagatgaactcacaactcagaaaataaaagaacctgcaactgagagtttgtatctagaatgtacttcaaaggcctatatgttggatatagtttggccttgacttggtacacctgggaagtggtagaactttacagaggcagtgtctactaaaaggaagtcaagtgattgggggtgtgccactgacagggatatcaggaccccaattctttcttgtctctgcctctggagtgctcatatgaggtaagcaggcttcctctacccccgccccctatctttttataatgtactttgccaccttaggcctaagttcacagagccagggtggactgaaacatttgtaattgagccaaactaaactttcctctccttctaagtggattgtcccgaatattttgtgacaataatggaaagcagactaaaatacctggctgccgagaaattaacacagaaaagtattgataagtttgacaaaaaggaaactgacagaataaaattcatattgtaggatcaaccaatgcagtaagaaattttacctcaaatttgataaaaaagaaactggggatgtaaagaaattatttcccagaatttacagaagatgttaatagaatcattctgtcactgtgacattagaaagtgacagtggctcggctacagagagggatttttttctacacgagtagcatcccataaacttgaggaaggacagaatctaaacaatgcactggcataacatattttgtaattatcctttgtgagaaaatagagggaagagattgcctccaagtaaaaatacatttgcgtgaagatgacactatgaatgtggatgtcattcttttggaagttttatttgatttactcatccaaaagtgtcacaaaaatggcagttttctttcactagtcttcaagagttactatgcctccagtttcaccttgtcttagagagaagcaataagctctcttctattaataacctcaaactttttacatatcaactttatatgtactatatatatgtatatatgtgtacacacacataaatacatgcctataaaggccttctcaatccactgtgctaaaaataaacaatgttatcacagggaccatcaggtagacaattaagcatttactgagggaaatggttatgccttccaagcaacaccctaaagtcgcttagtatgtcctgggctggtaaaagctggcagccttttgatcagtgctggacctctgtatacctgtgggtttagaaaaaagtttccacaaggggatttttaagatgcacactaatactaagtcaaaattctttttacatcattacttagaatagaaatgccttataccaatactgctttatttaaacacacacgctcgcgcgcgcgcacacacattcacacacacacacacacacacacacctttaagtgatttactccccagtctacagtggacttcactattttatggaatattattacatgctagctctaaactcccctgactgaaggtcctcccaataactgatgtaactgatataaaaactgatctccatttaaaagtgttagttgttgagtgtatgctttgtttctgtgtctaatggaacagtgtactgagtgtgcactggctctcctgccaagcactggaaatccagaggtaaataagatattctcaaggggagaaaaggagccatgctaccagaaaatgtttaggagagatacatgtgaaaccattcccaattatggcattcagatgtcttcattcgtttgttcgggacctttcacacagcattacttcttgatgtaggacaacaccaaaagcagaaaaagcagaagcatctggctataggagcttctgcatggaattcatctacacctacaagggactaaaacggaggtctcacatggtcccttagaatttaaaccatgaacctagaggcatcataacaattcattctcagcactcatgagtcaaacttctccttcctgtcctgtaaaaggcctcagtccttcagacgatttttctacaaggtaccacttcaagagttatctgtgattgctgtgcttgagtgccaataagattcacatcaaaccttgggatggtcaagactgcaagtaatagcacagggacacctaatgttggcctccatgaccgtttattcacacttcacaaagaaaataaccgtgagcatgcttttctaaatccttatagccaagtcttttccacagtgtatctgattgtaaatggaggaaaacttaaacacttaattacaaggaagtatgtatgacatataaaccacaggtttccaggaagaaaacccacataccagtgtcaattgacactagttaatgcatggccttcatgtgtaaaagtgaccaagtgatgattctgaaattgggctatggtatatttccatggctcagaagtatcttaatatcccttcaatagagaaggaaggacacatgacatgaatgatatgaaggagaaaagaaattcacatattggttagctaaggtcaggggttgaattgtttgtgacgctcccccacaaagaaatacacactgacatcctaccccctgtacctgtgaatgctacctcatctggaaatagtgttgatgtggatatcaccaaattaagatgaacttaaactagattagggtccatcttgacccaaatatcatagaggaagagctggatacagagccagacattggaaatgccttgtggtcatgaaggtggagattggagtgtttcatgtataagtctgtggatgccaagattcactggcaatcagtagggccaggagaggattcatctctgaggtcttaagagatagcaacattcctgacacctcggccatgaacttttagcccctagatctataagagtatagatttgttatgggccactaggttcacagttatttgctacagaaagcctaggagactcactgaacaggaatggcatatggttttgctgacagaaaacatcacctttgacccagtgtataagtgtcaactcaagggacacaagggtttggttcatcttacttttatatctatgctgttgttgtcagagagatctagattcctttttgtccttatcaataatggctatgtatactcagagaaataaggaaacttcctaaactttagcttccatgagttgggagtgatatcatttaccctacaagatcacaatgaagattctcaatgaatgacatgaagttccctatagcatacttggatgaactgggttgataaaataactaggactttggaaataaattaccccaatgaatgataatttttgttgggtgaagagggtggctttctttctccagaaagctaactagatttatccatctttagacacataggttaaagctataactaaattaccaccaggaaagactgaaatagtatggtatgaagacaaaatccaatgtgcagaggacacaaaccttggctgtgctgatccattgggctctgtggagggcccattcccgggtgtggtgggcgcatgctggcgcccttcatggatccacagtgggcatcgtctataattcccttgtcatgtatcccgtccatgggctgaaacatgtaaagggcatccattagacacctctttaaggtagagtatttctaacaagactatgaagagttatctccagtgtttaaagatatgacacaagcatttactatctattccatagtcctatatttatatacttcataagtaaaaacaatagtaagaaagattacaccaataggatcagcaaaaccatctctaacaaaaaataaggctttaaaaactgttgaatttcattctttggccaacgtttacaatctgcttttaacttgccaattaaaaaaagaaataaagtaccattcctagggtagacaaatattactctctcatacctctgtaaatagccttgaaaccccttacatattgaacttattctggagtccaaatgaaggctatgttaaacgtctgaggtgacctattttcctggtaatttttcttcactggatgaatgaactaaggaaagttaaaaagttgaaccagaaggttccatggcagttgggaaggagaagaacatacagggcagagaagcaaagggggtgagtaccaaacaggagggagtgaaaacagagagagtggtgggaagatacgctgtggagggagggaaacagaaaaggctaaaggcacaagctggaaataaataacaaacactggggttggacactggacctgaggcccagaacatgatagacatacaataaatagctattgaactgatgttaatccaatccagaatcaggcaacagagcatgtgtttggaaaaggaaaagtctattcttccccaaactgtaatagcaattttcaaaacagcctgaaaggaacatttccaagagtttataaaaaccaaatgacttcaagcaagaaagtatgagtgtttgcagttttggagaaaagaaagttaatttctgcagagtcaaaagcatgcacttgaaaagagggaaattttttaccataaagaggatgctcagaagaaaaatgggaagaatatggtataaagagtgtcactgagtctgttaagtagtgataatagagaggaaatcaaagccaggcagcagatgtatttagaccacttgtttacttattttcagtgatgttgaaaagcaaaaagctgaagctcagagagagatggaggagaaagacaaggaacacagcctcctgaaaaagaactaggaaagtgaaggcatctggccagcaggtgtgagctccatgggttcactcaggtcctcacacagagagctatctgaggggcggcaagggagggagagcaggatagcaaaactgcaaggctcaaaaggaaaatctgcagagctcacaggcaagagaaacacaaaaccaaaaagtacctagaagtgtagagaatacaagagagagagagtacagatcatgggataaaaccataggccagaagagatgacaattaataaaactgcccactagaaaagcagggcagaaccagtcctcacccacacatttaatctttaaatgtttcaatcacaaaggttaactaaacatgtcctccacattttttccttcatttgaaaggtgaggccttcatccttaggtcatgccaaagttctgtaacacagggacagagtctacaaaggcggagcagatctggattacatctcaaagttaacatgagataatgcaatgacttcagtatgtcaagatgtcaccccagaatatgccatggaaaataagagactttagttcttagatatttgacaagaaaacatggattttttttttttaaaaggagggcagccaggcatggtgacacagacttgtaatcccagcaggccagggatgaaggagaataggagtccacgccattctgggttacacagttatgtcaagaccaccatgagttacatgagactctatcacaaacaaacaaacaaacaaacaaaggaaaaaggggtacacaaacatggggatcctatagaaatacatccttaataaaaagaggattgtttttgagtaataaatcgggacagtgtggttctgtgattaggaaaaaaaccacacctgtctatgctgatactgtacttttaccgaatatggaatgcatgttcacctgtttccttggataactagctcatttatcttggtattgtgtcacttttcacaataagcacatactacttttctgatttggaaatcatcaaataacttttttttttcagtagactttccctttggggttcaaatccctacctggaaaatgacctgaagtcctataaagtgagagaagacacacccttttccctgaagattcttttgtttcaagtgagtgtcttctagcacttgtctactgggatggttaattttatgtaccaccttggctagatcacaggtatccagatacttggtaggcatatataggcatatatatgggtgtgtcttcaaggggcttctagatgtaaactgaagaaagcagagtatgctggcctaggcagcagtcatcattccaaatctactcagagtcaaagataacaaagggtgcaggtgggagccggtctgtttgctcctgacctaggctgggagttggtctcctgatcttcccctggggcctacagggttgaccttcttgattcccactgacccctctgggtctccagcctgtggactacaaactgtgtgacctctccagaggccaattcctcaggagaaatctcttataggccactggttctgtttctccagaggacctggatgtatgcactgcacatacaaggggaaggcccacatgtgacatcatccacaggggtgtaaaccctacacttgtctcatgagggaagaccttcatgtaacacatgagacccttattgattttcgttgatttgctaaccttcaaagcaaatagtcaaagaggaactatctttctcaaaaaggctgtctttagcatctccaataagggctcaaggccaaacggtaccaatgtgatcatcctcacagcaaacatctcataaagagaggatcgctagaaactactgtagaaatgaacagacagatcttctgaacgagagtaaggctgctaaacagggacagagaattcccaagactccccatgcaattcgctcaccacactggagaatgaccaggactactgagagtctggggccaacctgagctatctccgaatctcaataaaccaataaaggaagaatttcctagaaactatttaattttaataaattctttcgaaaatatactttcttgtttatttgtgtgtgtgtgtgtgtgtgtgtgtgtataatgtcagtactgactgcaagaacagcaagtaatcttaactgctgattcatctctccaggcactgaaatatctttaggggcgggggggggggggggacggactttcacctttcattcttaaagatttaattttgtcaaataaatttcaacatttttaaggaagaataattttcaatatatattgacttataggagagttggaggtctcattaattaattaatgtacttattcactaagtcaaaatacttttaacccacaaatgcccaaacttactcacattatatgctagacgtttgtattttacaaagacaacatctttattactgggccatctgtaatagtgagagtacagcaaaggcagtgtgttgtacattagcttgaggagtggttgtttttgcttcttaagacagaatctccttacatagtccaggttggcctcagaatacatgatcctattgcttcaatctctcaagtactgggattacaggactgtttttaacaacctacaaattaacacagaattctagctagatcctcatgttaacaacaagagaaagagtcatcaggatgcaaccaagctatgcctgggaagaccggtcaagtgggaaagagtgcacaaaatcttaccttatgcatctggtgtatggcttcctgtggaaagtctgcagagcccattgttgacataggatgtgagacactgggcggtccaggactgggccccatcatgctgtggaccgaacctggggatggtcctggtcctggactgggccccagaattggtccaggagagggtccaggccccggggaaggcccaggatggggcattgcagctgggtctgtgggtgtggacatctacttctcctggctctgccagtcagcagagtatcactaaactggagaagggaaaaaaagaaaagaaaggaatgttttaaacatgatgttaagatccaaataaaacagttgttagaatttgatggtgccatttctataattaacatcaaacagaactatcctgtctcttccagatgtttgaatgaatgtgatatatccctgggccccagtctttatgaagaccacttgcaaaaaaaaaaaaaaaaaaaaaaaaaaacatactctaagtgatcccccggaaacataaatcatccagtgtaacagagagactcactggagcaactgaaatttaacacataagcagaatctaaacaagtctgaaatatatgactaaacacagcagaccctctccattaaagactggattagacaccttaaaagccactgcaaaccactggaatagaaaatccgtaacaaattttcataagccaacaggcaataaaaactttacaaagaattctaaacagttaaaaggggcagaaacacgagtccatcaattaataataggaagagaagtcccaattatagaaaaagaagaaaggtagctggtggtggtggcacacctttaaccccaatacttgggagggaaagacaggatggtctctgtgagtttgaggccagcctcgtctacagagccaagttccaggacagccaggactacacagagaaaccctgtcttgaaaaacaaaacaaaaagaaaagaaaagaaaaagaagaaagtcatacaagtgtgggttcaaatacactcagacacaattactaaggtaagttcttatcttgaaacttcttggagtcagatgagatagtacatgcaaaaaaaaaaaaagaaaaaagaaaaagaaaaagagaaaagagaaaaagagaaaaaagaaaaaaaagcaacaacaacagaatccaaaactaccacagtctgtatgccttgtctgtctacccaccacatctactgactggaccagaagtaatcaaaatggacaaagacaacttactgtcctcccagacaagtaacagaaccaaaaccacttgggctaatatggttcatgatttgtgctaggctactggccaaagatgccagagagtagttgtttttagggatagacattttgtttctccagacttagctgaacactactctgtcacccagcctccaagccatcctggcattccccactaggaaatgagtgactgagtcaccgcaccttggataactaacagtcaaaatgactacagaagatattttccaaattcctgtagaggatcaaggattctagcaacacagctgaatgccaccatgataacacctcttccatgttcaggagttatccagcaggcagacatgtacacggggaaaaagatttttgttgtcaacagaaatggcctcacaaaacacagaacggcactcccaacccaacccatcccaccccggaagtgactcccttacacaccacataatggcagagatgcaattagaccaacagcctagttatccaggtgaagaaaagtatgaagagccgcatcagctctatgcctgtccccttactgaccctctagagagcaaggcccatgaaggcagagccttgctctccaatcctgtgtccctggcaccttcaacctgcacacattatgagctcagaaaatacctggtaatagtcaggcatggtagttcacacctgcaataccagcacttgggatactgagagtggatcactaagaaatctgggccagcctgggctacagagtgagaccatgtcacaaaataaacagacaaaaaactcggtgaatgaacagcaggcaaaatttcaagggcaagtagattcaattcattttgaacccaaaaagtaaaatgtaaccggcatttgaggtgtgtaaacaaagaattttttttggttttttgagacagggtttctctgtggctttggaggctgtcctggaactagctcttgtagaccaggctggtctcgaactcacagagatccgcctgcctctgcctcctaagtgctgggattaaaggtgtgagccaccaatgcctggctcaacaaagaaaatttttaaggagcaggcagaaacataagctactctagcgaacaaattgaggttaaaatgggaactcaatacaagtgcttcctcaaacacggaaggatctgggatgaattataaccttaagtaccctaagaactaaacgttatttatttttttgtgattaacaaagcaggtggaaataacttttgtgtttgctttccacctacctctcacataaacacaaacatgttcggtcagcgttttaaacttaggaagttgacgtcaattcacgggcactacaagttataatgctctgccatgtatatcaacaaaccgatacaccccttcattttttagtgaattaaaggaaattacttagttcctgttatggtttgttgtgaaatcgacttcaataggtattttggtaatatagcacaagtttgaacaatgaagacacaaacactcaagttagcctgatattcctactgcttattatgttttatatcacatatatgtatacatatatatgtatgcatatatatgtatatatacatatatatatgactgtattcttcaggtattattactttcatctggaatctctgaggtgttgtaaaatacatacaactccaaacaaatctctctctctctctcttttttttttttttttttttttttttttttttttttttacagaaactaaaacttcctatgaggaaaatatttttggagggaaatgagatgctttggagcacataaatggaatgttaatataggaatatgttccatggaaactccataattagagattctacagatggacgcaatgtgtagaggtctacaagaagcagtatagtttaacctgggtcatgtgaccaaggaatggtaaagatctagactctcagagttcgaaggagatgatgtctgacctgcacctcaacaatgaatccagagatctgagttctgtctcaagcctactaccctggagtgctgaaaaggtactttccccctgggttcccttggctctctctaggcttacgatgggaatattgaaaatgacccttccatctacctgtgactcagtgtctaccatcatccagaggaacacaaagtccacatctgatcctgtgctcgatagagctgatgaatgggctactatgccccaaaccaggactgtccactcaagtatgacaggaagagacctcacaaagttaaggccagtagtcctaggcttattcttcctctacatttctgctggcaactttattctttagttcaaatgcacaatggcacaatcttaaaatgacgtgtagggctacaagttacagaggtacaaatctcaaggcagagagcattattgtcactgagtcagcaatgagggcttcaagtgtaggctggccaacccggctttctcactgtgtccactcaactccttgcctctttatccttcctggaagcactagatggtggagctaagggagtggtcacaggagcacagtgggagaagagcagggctcagtctgggtgacaatttgaccaagtgatgaaactgacaatccattttcattttctgttggggacaaagttttgcatcgcctcataagggaactaacccattctacaacgatgtggctattacactgaaggaaagacgcctgtgggaaagtacagctgccacccatacacaggagtgcagccccctcccctgtcatgttaccctctgcctcagactaggactccctgagggccaggccactgtgttcttggcaaggattcctcagcggtacaccctgtcttcttcacccagacattcttgcctttacaactggggagtgtgtgcttttaaaaggccatggctgcacttcccacaattccaaatcccacagccactagcccaagtctccctctcctttcccccccctctcccgttgaaaggctgggcacctccatctgcatagtaaaaggagttcaacttcatggaattttaagggtcaccactccaactaggacaaccaagacaaaacttcacacttcagtctaattgcagtccaggaaattccgaggacctgcatgtgggttctaggatttaaacacacctaatgtgctttatagccattctaatcccttgaattaaggaggtggggtattatcaggctccccctgaaaaggtgaaggcgggaagccaggaaagaagagcctggcttgtccaaagtcacatgggtcacaggagcagaacttcttacagagcactttatcctttgactgtcagtgcaccaaccaagcagggcatctaccaggacaagcctatcaccacccaatcaaggttagctgagccctctactttcctgcagatttaaggagccagaaagccacaaaggagtgaagttctgagtgagtgtgcgttgttcacacaggcatggccatgtcaagtatgccatagcctttctgggggggggcggggggagagagactagtgcaaacactgacagtgtgcagaaatgttcatcttaggttccccaccaccaccacgctgccccagatgcttctagcctcaagactgcttccctgcagagactgcttctcctagtttaactgaacctgtctccttgattctgctgtatacctgtaaaccctgcctccttgtttatctgtatgcagtgaccctcacctcattgtccagccatattcaatagccttgcctctctgtgcaactctatataataaacatgcttgctgtcctgggtaccatgatttctctagaagagagcccagtccattccatctcagcttactgtctatgtgtgtgtttctcatctattcgctcgctgccccagttgggtcaaaatcccagggagctgtacatggatgcatcacctgaaaccctatgcccaccaccacaaccatcatttccatcttctcctcactgctttgagacaaaagaaagggatggggattcctaaggacacaaccaggagaagctcagctggccaatcaccagtcttgaccacactgttttagggatagcatgcctcggcttgagcctggtacctctgtaatgtgttccactgctgggccagacagggttagaaaattggagacaaagaacaaagatggaaacaatggcacaggtgttttgtaaaggccaggatttggctgggacaatatatttatttatcaaggcatgaagtaaggagaagccaagccctaaagagatcctgagatgaaaacatcattgcccagaagggtcctgatgcttaatccaacactaaagcatgtgttttttatgtatttattctcaattctactgagtgtctcagatagaggggaattacaggagaacaacagggatgggggcacacataaatacacacacacaccctaacaggaaacgtatgcataaacagcaacaagagaaagaaaataaagatcttccaaaacaagtatgggcacagctaaatgtctccaaggtaatagggcaggaaggagggatgatacttagagaggagtaaaggactcagggaggggttaccagagatataaaaataaataaataaataaaactttctagaaacaagaagagttggggagtgctcactaacttggacaatacccctaaactgcccttcaccaaagctcctggggaagcttggagatagcccaggactccagccaagctttcccaaagctcactgcatagaaagacttggagggccagactaaaggtagacaatcacaaataagaacttagtccaaagcctaagaataactcagcctttgccagcattctggcagttacaggagagcgataaagcttaggagataagtccagataggagtccttttgtgtctgtctgctgagtcagaagtctctggtaggaagggctgcttgcctttccccctttcccctacataccttctctacagatgaattgaactccttcaccagatgtagccacttgcctagaactggacagagcacaccattagtgttggtaggtgggcagtgagcaggacaacagtgaagatacaggaaataagtctaccaggaggagcctcttgttcagaagacaagcttgtctgcctcagagttaaacatcatgaaggcccatactgctgcttggcctgagaagtgcaactgtaaacagttcccagtataagttgtgatggtgataaaaatcatactgtgcctaaagctaacgtaagttgttccacccaaaccctagaaaagcattgaaaacacattctcatggttattcatgttggcttgccattcatttcaaagtcatatatggtttaagaagtgcttggatgagaacttttctgttcactgggcttctgtgaactttctttcatctttcaatcacagaaacaaatttaggacatgccagagctgctgccctgcctttaaataaactgccttgggaccatccttgcccagagtcagacctggcaaaggctgggaagaagctgggtgcacagggaagataacaacaaactctgttgcactaattagtacacacacacacacacactctctctctctctctctctctctctctctctctctctctctgagggttccagcactgcctgggcctgggcctgggcctgggcctggcttcaccttatcacctccatggatacctgagttgccaccctccagtagtcatccacctgtgatgcactgtacaccatgctagtgaggaccaatgacattcccacacaggaaaaaaaaaaaaagtcttatgaagggtgtttatcagaaaatccaaactgtaagaggttccttcagtacagaaacaacacacctctctaatcttagactcaaggaatagggacaagcaaaggttaacttacttctaaaatccaagtgagcacacactgctaggctattggccataaaagaaaccagcagatcaaactgtcaaaatctatcttcaaagtgggtatcctgaagtgtaaccaagcactcgtacatgttttggacatgcttgcccttcccagacatgcataggctattccccacagcaacctcattttagggtgctgacaaccatcaatggttgccacttcattttctgctaagaaaatgtcacctatacactaaacactttttttagagtacgaaatgcaggcacacttttacttgggagcaaaactggacatttaggcttacatgcggagtgaaccagtgttatatgtataacattcccagtgatggcactgggaattgagcccagaaaatgagcctaacatgtatgaattaggcaatcccctctatcactaaaggacacccctagcccagatgatctttaatatgctcaacatttcttggctgacttagtcacaatcagaattcaacaaggaacccttcaaatacgtggcagtaaaaaccgacagtagccattgatgaatctgacagtcatcaacaggtccactgaacctctttggatttcaagttcctttcctaccacggaggcacactggaaagccagcagcacatttagtttcgagagacactaaataaaatatcaggtgtgcagacactttgtgaacttattgtagacaaacactcattactgccaggatccttttaagatcttcaattctcaccgtgaacttgaatatacaagttaccagatgagtctaaaatacagctgtgctcatgaatcagtacccttggctcaaactttctgacagaggctggagagatggcccagtggttaagagcactggctgctcttcctgaggaagaaccacatgggtggctgatgactgtttgcaacttctggcctctatgagtaccagtcttgcacacagtacacagacatacatgcagaccaaacatatacacacaaaacaaataacatagagatatttgattctaagagacaagtctccaacatacactgggtaaaagggtcatgctctagtctgtatgtcatggctttctataacctccaactttatcttttaggaactctctcctactgggacctcttggtccaggcaaactagtccaaacaggtacactgggcttccaaaggcttgttcaagctgagtccctgtgacctagggctttcttttgatcccagatgacctgaaccaccaacccctatctctgctctgttcttcccccaccctaacccctcccttagatttttatctgtcctatcttatctagaagtcaagagagctggtcctgatctccctctgtcacggggctcagcaggtcacttgcttctcctgtgtttagatactcaggtacattctgaaaacacatcacttcttactgaccactgatgttttgttttttatttttttaacagaattttggactttgtttaatggcatttcagaacagaacagcaaaccacagaatagctgcaaatatttgccaagcaattatgtgtccagttgttaaaaagcctgggggcagaggaggctttcctcccagacaataaatttccatagggatggctcatctcccagtgggatggcagaaactgcagtaccacatccaacaggcaaagaaatgtacaagcatcccaaacaagaaaagtacaactggaatgcaaatccacagagaatcccctcaagtaacctgggtgccaacacactactgttctctgcttgctctttctttctttctttctttcattctgtttttcttctttcttccttttttcctttctttctttctttctttctttctttctttcttctccttttacatatttttaactcctaaatgtcaaatccagtttttaaaaagaagagggatttataattacaccttaatggtttttaaattatgttctatttcagcctcaacttctgaggattccattcatcaattacaaacaccaggaccacacttagattaaataacttctttaaagactttctagtacagaagtgtttgcacaaatgtagatcatatactggtgcttaccccccataaaaatgcagtattcttagatgctttaaatcgcccagaattatagcctgaatatacctgtcagaatgtcccaccagcctcatagaaccaggaaaataacacaattcactccaagtttcccagaagtccagaaataaaccatgagctagggctgctgctcagttggtagagtatttgcccagcatgcacagagccctgggttctacccttggaacagggtgtgttgatacatagttgtaattccagcagttgggatatcagagcaggaagactgacaaatcaaaaaaaaaaaaaaaaaaccagtcaaaatctgtatcactatccaattcatcattctagatgatcatgtgagagaatgaattaggtgtttctagtcagtgttcaaaaaattcaccatttagctactggacttcatcagatcccttatatggtttgctgaggtataattattcaggtatttaaaactacattcaaaaaacctttagtacttgaaagtgctgcaatattctgaacactttcaaggaaaagtgctaaattaatgtggacaaataataaagttataacaaaacagtaacagagacatgaagtctttcaaaacctggttgcaagatcccatttaacttggtgataaatatgccctttcataataagtatttgaaaaggcaaataaatatgctcttccataaactctggcagggcatagtgttagacaattttttgtatagagaaataaacaaacaaacaacacctataacttcctaaacactataccaaataaattaccagcatctgtattttctatacccaactactatatagtgactcatcatcatcttattaactggctagatattaaaagttccacacacacaaaattctttttctcatagatgacaggaaaaaaaaatcaaaagtaacctccaaatatggcttttcaccaagggcattttctcatttgttcattagaaataacacaggagggaactgtgtcccacagttttctgaggctattcatgcaaagggacaactatccacaccctacagcatctaaagcagaaacagtgtgaatcaaaacttctggtagttcaggcttgctggcatgccttcacaatgctgagacagggaaatggtcctgagcatggtgcctgagataagtcaggcgtcctcgtggcagcatgtcaaaatgtcataaatagtgatttattatttctctagagtagcaaaaagctgctgacctaggagggtttgacaaaggccttgtttacaaaggaagacttctaagggagggagaaaactggaaatgctgcaggacagcgccactttcataatttatgaaacttctctgtttacggtcctcctccaaaacacaatgagcccttacaaagagacgtcaaaatattaagagtatgtcagagtatcacagctgccttctagaagagaaagttgtgcttttacccccaacacacctgcctgcagaatggtttattttaaacctaatcaaagaaacagagctttaaataattaccggcaaaggggttactttctatctaggtatactgtgtcaagaatacttacaaggaagaattcaagcactaaccagacaagaagcacacttttattgcggtcaattctaagcctcaggtgttggccagagtacttttcaagaaacctgatgagaaatgctcaaacaaaccactctacaaaagaacaaaaggaaagatctaagatagctttgaacaggctgtgtggtaaatgttttctgtgagacaccacagtgcagccagagccaaagttaggctctgagtgatacaaataagtcctgagagaggttgcatgaggcccctccctgccgtccttccctgccaaaggttctgacacccccaatcctaactcatttaaaaacattctttaccattatggccacacttttccaaggccaaacacaaactagatggacctccacctgtggataatttaccccctcaacctactttaataatcaccttataaacataagggtgtctctaaatctcctttgtttttttttttttcagtagtaaacatttaaggcaaaagggagcattttgtagcccttttgttttttatattctgaagtgtttttttttccttaaaagttttcttaatgtatattaactgtacaaaataatgggtttcattatggcattttcatacaagtttatagttgtactttatcccaattaccctctcttgtccttggtcccaagctgccccacccccaccccacccacacacttttgggtccccctcctctactatccaaaggcagcattttaaaagcaagtcagcaagcctagaggaataaaagggcaattagattctgaaaagacaaagtgtgtctctatttgcataataatgccacctaagcatcaacccagccacaccccctaacccttcaccagctgtgcttagaagtagtcctgacaagtccctagtgggtagcaactaaaagtagggcctcaaaactggagggaaatgaatccgaaaacactggaacgtgcttttttaagtgtttgcatacatagcattaaacgtggcttttatgttaattagaggagttctcactgtttcctgagtccagggtagtttggatagaacttttgtgctaccaaacccaaccacctctcaaaccaacgtaggtgttcccacaagcaagatatacaacccccaaaagtttgaaaattaactgaaaccttaaacattaccacgccgagcaataaacaaacgtgggtccttaacatcttccttatgctccattgttatgaatacaaaggaatacgtgccaacacgatgactagaaaggacacaatgatgacacctctccaaaacattgctaactcgggtcactctgttttttcaaaagcaccagcctccctccattgcactggggaggagggggggggggaaggacacagcctggcaaaactccccaaaagttatataaacaaaggagggagaagcccaatgtgggcttcgcacccatgtgctactaaaattacataacacccggtgcagacactgaatgaggaatgattctgcactgcacccccgctctctccactcctgcactttcttccttcgctttaaacaccccaatgccccacgagagagagtggaccgcttgggatgttccttttcttaatggagtgaatccttggagagttgcaagcttgtttaggccccgaagtttgaacgtgcaacagcctcagggttccaagactcactctctccagacctggagcagtggactgacaacgccagccacccgcgaggccttcttctcccccgcgcggtgcctcccgctggaaagttttccctgcgatcgattgcctgcctgactttgcaaggaaggctagccagagaccggagggggccccccgcatagaaagacctagaaagctcggtgggcggtggcggctgcaagaggcgcaggctccttacctgggcgactcggaatggccccggactcaggcgggtggcgcctggggcaaggagggagcggagtgcacaccactgcttaggccggtgcccggggccctgcccccgccgcctcctcttcctccctcgcgcgcgtcatgtcacggcgatcaaacatgtctgtgcgcttcgccgcggtgacttcctgattctccgccgctcgctcgcgcgcgccacgcactcgccctcgccgccgccgcacgcaccgccaccgcctcccgccctctcgccgccagacccgctgggtctgcgtccagctcccgggagagctcgggccggaggcgcagccggcacagcccgccacgcactggtccctagtgcactgcacactcccgctagcccgtcgacccctcctgcccctccacccgacttgtggccctgccaaactttttttttttccgggttgattggtgtccaacttccctccgcccccatccccagggaggccccccccaaccccgcgctcaccaccatccgcagcgaacagcaacctggataaaaataataatgtaatccaggcggcgggggcgaacgcagacacccgcaccgggcgatctctcccgggtaccggaaaccggcgcgagcgccgggaccggagagcgagtgtctcctggagtctacaccgctgcgccccgccgggtgtcactgtgtccaggctgcgcggcctggtgcggggcacccggggaactgtgatggtgtgcgcttggtggctggagggcgcccaggggctagcgcgctggaccggtgatttggggaagtgcatcgcgacacctttgcagatggcgtggccctgtttagcaacgccaaccggaggggaggcatcccggctttgggggcagacaggggaaggggtgaactaggttgggatgggaataaagcaaactcaaagcaggcaacgagaaggaaggggtgagtgtcatagctgggaggaggctcccaccggctctccccgcctccctccttcgccacctccccccccccccccccattccctgcctactgcagccctttcctttcccgggcgaaagccacgaccgctacccgagtgcgcgcgggtcctgttgtgacagtcaggcagagaggattatccggatcatggcctccccagccctcagccgccgcggctctcccgggtccctgtgcgcccctgacacccagaccatcccaggcgccccacagccgcggcttcctcggcgcaagccaaggaaagacaccaagcaaaagaaaacaaacccagagaggggggagggcaggctaacggagccctgcgggcacctcggacttctttccttggggcttccttccaccccccgcagtgggaccctggttggacaccctgaacttcaataccccagcccgctcagcctccaggtaccagacaaggaggtccgtggcgccacggtcacagcccccgcagcaaacccttcgcttgaaggcctgtcaccaatcaacatccccttccctgcccgaggggacccgaggagtggaggtgacacctccgagcccgcaggcaccgactcggccaccgcctgctcagtatgccagcccgaactactcccgccgtcacggtctgctcgcgtccccgctgccggagccctttaaacaagtctctgggagacgagtagcagccgtgttggttggcgccctgccgccagcccgggctcttcgccctcctttctcgtttccttccaactctaatggagaggatggctcggggtgaactgtcgcgtttccttccagcctcccctctccggttcctccagactctctccttctcttgtcaccccccccccccacacacacacacacacacacccctgcttttaaggggatgggggatgcaacctggccgagagtgtgttgaaaccctgagttggcagcacatagctgtcagcccgcctcgggtcaaggctatagcttgttgggatttcttcccccttacccccttgaagtagtaattattattgttgttattattagaatggcgaggttcggtggaaactttctggtttcttctatcaccgcccgggagctgtcgttagagcattccacctgaggcccgcgaggaagaggcgggctttttgttgtagcggttggcccgcctgtttgttttggtcttcgagcatgcacaataaataatatgattaggataaagatgcataattcggggcgaaggcggtgcggtgccagaggggttcggctgcgaatgcagccgggaggccggagccggggagagaagagaaaggagttgtaagttatatttaccttgctcgcgagcagtgtgctggctgaatcttccctctctgagtcacccagagtacagcaacagagggagcgaggactagattatgaatatgacttcattgatgacagccgtcccctcctcttcctaaactcgggctccgccccgcgtcccaccctcgccgcctccacgggcgccggaagacgcgccgcagttggcccggcgcgccgctcctccctgcccggcccggtgcgggttggcgggacgctcctgtcactcgccctgctcagcgactccgggagcgcggggggagcagggggcggtgtgcaagaatgtggatcgagacagctctactgtatgcgtggatccgtgtgtgtctgcgaggcgccggctctccgctgtgtttgtgcctggagcagagaaactgcgcaggactcgcagccagcccgcagccctactggactagggcgccgcgtgtccctcggctggcagtagtcttccgagctcctcgggggaggctggggaagcccccgaagcgaaggggaggacagccgtagtaatagagcgtagtagttcggggaatgtggagaccgtgctggaatttaagtgtgcctgcgcctgccagctcgagcctgcagagagaaagggaggggacggcgggggcagggctccgagtggcaccaaagctgtttgtggcacagtgttggcccatggggggaaaatgggtattatcataccagctgaaactttttcgacccccccttcccccaaggctgtcataaatctgcgttcttctcacccatccccaacccccagtgaaaagggaggcggcacaaagaacgagtctgccaaatctgtctcatccgtaaaggactgcaagcttccaaatgccagcgacgagaaacagctgagaggctggacgcctagtaaataaataaacccaaacaaacccgcctaacccctgtgtttacttctgaaaagcactaagcactgtcacctcccctcacctgtcatcttcgagcaaaatatacatgaaaatatggggggactaccccctgggggtggggcggaagagtcatggggcagctgaactatgggttctgcttttgatttaaatagggaaataaatcgcattctctacagaccggagtctcctctctctttcaccccacatttaagaccaattaaggctacaaactgcaatttgcctgcacgtagtggtttcgagagcgagtgcttcagtttcccttgaaatacagtatgtcagctggaccctaggtcactatttggtgaggcagttttatttttagttttatgaagtgtgaaagaatgttaggagattttaaatcaggggcctattatattagactcagattaatgtaggtgcttgactcttaaaattaaaactgctcctatgtggtcgtgttatgaaaagtatgatttatcccttattttgcaatgcaatggcttaaattagtcattcaaagtgcactgtgactgttgaggatccctcccaccctagagaaaaatcctattttaagacggtttataattttacagaattgactgtgtgggcaacagggtctgaagtgccattctaaggatgctaagctccgctccaatactgggtatgttgatgacaaggaacaatgggaacaaatatcagattcggtatgtgctcattatgtttcaagaagggtttatatcactggtccaggccccaggaggaaacactaccaagtctccactttcgcctagtaaggagagcgaatgatcacacaccctatagttttatagttttccaaaatgctattacttgcttgttatattagtcttccttgttttttgtgtaccccaaagtgaacttctaagcaaaacaaaacaaacaaaaaacacagacactaagggactagaatatagtgtgcctggaaggttataagaaattgcttctcttctgaggatagactaatataagagcaactgggaatatagtccaatactaaacacaattaatagtttagtaagtatataatctaaatactaacttctaactgcctaatgtttcatccttacagaaatacagccagaaacctaattgtgtataataaaaggctttgacctaatgacaatgcttatctttattcactaacacggattaggttttcaactttatgggtccactttgtttccttcatatgtcaactttacagcccaaggttaacaatttgaaggccaggtggtggtggtccctttaatcccagcagaggcagaggcaggcagatctttgtgaattccactccagtctgatctataaaacaagttccaggacagccagggctgttacacagataaaccctgtcttgaaaaagaaattaagaatttgatgatgtcacactgtgtgtgtgtgtgtgtgtgtgtgtgtgtgtgtgtgtgtatttatccctatccatttttcatttgtctctgtatatatgtctgactttgtctgtctgtctgtctttctgcctgtctctctctctctctctctctctctctctctctctctctgtgtgtgtgtgtgtgtgtgtgtgtgtgtgtgtgtgtgctttgcaggggctagctatcccaaagtgtcctggcattcacagcctcctgacccaggtataccacaccatgcccagcatggctttacctttattcccttgtaaataaaatcttacctccacttgccatgacaaaccttagaaagagcagccatcatcttctagacactaaagccagcagccattcctcctggcattttgtcagagagaaagtaaggagaaagtcttccctttgttatatgtgtgtgttctccaggttacataaaattttgatgcagtacttggaggggttgctacccatacattatatgcacaactacaggaataaaagaacacaatatgtagttgggagtacagattaaatatagatacttggctctctttcccctcacattgacctaagaatgcctcaccttctcccttcaggtttctcctctgaagaattgtcttgtttgtagcttgcactgcctcaagtcagaattttatcaaagcattcttaaactcatgagaaatgaaaaggcagcagcatttgctccgtatgaaaaagagagtggatagtatataacacgagcttcttctccgaggtaaagcaaaatataacaattgatgatgctaaggaagaaaatgagagacgcttttgtttgtagaaaatcataggaaagcaactatggtgagaggctaaaggactcagggacgctgcacaggatgctacattcccaggaagcttttctttggggactttgatgagtcataatatgttctctgaagttgcttttctctttctagcctggtatcaaggggtggaagttgctttttcatgtctgcttggccacatctacttgttatgtaagtctgttttggcagatgagaatgtctctatagagtagatgctgggtttaaaaactgctatctggttgcaacaccctcatgaagaaaaactgcatgcacaaaatttggaaacttctagtcccaacagagtattactgtggactgaaatgttacatagcttcaggccagagcaggtgaggccatttagggaatgagtctttcatctgaagtaatacaaactaaactttggcaaattaaatcagctgacatttagtgaagagtttagaattagcaagaaaactgattacagaaataaacactcttttctcccacccccaataaacaatctataagaaaaatctggtctttccctatcatttctccaaaatgccaccctaattttcttggtgagcatacaactctctactttaaaatccatatgtattcccaatccatcttgggagaaacatcaaacttcttagcatagcattcaaggccccaagggacaggtctctaccctccttgtagtctttcccaaagtgctgacctgtgggagatctggtctagctgccagttcctatggagctctactgttcatatttccctctctgatatttgtgtcttaactccagatcctctaagactcacctgtgacccaacatctttctagtggtccttgtgcccttgttgatggaaaagctgctggtcctactctgcttccatagcaaccgatgtgtacctccattagagcacttatcacttggatgcaattatttgtttggtatcctccactagtgcctagagggtatagagtaagttcaattcatcgtggaaatcccagcaattagctagatgctttgctcagtgtagttaaaaaacaaaacaaaacaaaacaaaacaaaaaaccccaccacttggttgaatgaaaggatgagaaatagataataaatttattcaacatagagaattcagcaggtctttgccacaagtaattatcatattaacgaacaaaattatgtgatgttcacaatctttatgatatttttcaaactgaaaagacttgaaaattttggggttttattgtattttgtttgtgagcttcaaaagtgagaagaagctgagctttgaataaagagtattgacaagttttgtttatctttggaccaatccaaaaggaatggtggcacagacatggcagctgtgcacacgaatagaatcagtcagtcctgacatcagcttttgtttatttctcctttacatcacataccagaagttgggccaagatcttcacatgtatccttttatccctttcaccagatgagaaatgtgacaccaaccccattttctagttgcctaggctgagacggggtaagtaatgttcttaaatagtgctctcctaggtggagaaagcaaggcaatttattgtaatatgagaagactaccagaaactctgtttttgcttcgtggccttaaaatatttctgtcactacaaacccctccaaaagagggggggtattgtaaatacttattttattcactgactgtagagtcttcaggtgcttccaaagcaaactagtcttaagtcatgcacaacaactgaaaaggattgccatcggcaggagtgatgctggcacccttcagttctttctttggcattgacagtacctcaggttaacaggttctaccttaaatggattcacagatgacattactgtctctaattttagccaatcagtcctcttatttatgaatcaactgacgtaaaaagatttctgaaaagaaatcaaagcttgagatggcaataaggcatgcacaggtgaaaaatcaggctgcaaattgctactttagcccctaagaattctttccagccatgttgagaagaaaaacagtgagggtctaattagatcgcacaagaaataggtcaaaaatatccacaattacccaagactgcttgagatatagtttgatattaactatcactcatgatgaattctgacttaagcattcagtttgtgttgaggcattcattactgataatatgatgtaatcataattagcaagataattaaagttttctctcatcttcatcttatgccttcatcatttctgctttgtgcttcatattatacttgatatatcattaatactgaactggagtttaataaggaaatatacataagtcatactttatcttactttctttttaggttggaagaaaatgtgatcgaacaacttggagatgactaaatgacgaagtcagaattttgacctcaggttggcaactcttcagactcaagcaatgtgtgttcatgtgtaaaatctgtaaaaggttgtcatcagcaaaaggttcttgatccatgctggaacactgatgggggtattatataaatcattttctgagcatttactgttccaaattttgtgttcatgataacatggattttgattttcatagtattaaattaattctatgagaatttcttacaatgtattttgataatatttacccccaactcctcacatctttatcgctctactttgagttctgttcctttcctttttactttcccatggaggccatttgtgctgcccaacttctcttggtaggggggccttcctggagtgtgtttaacttactagggatgacatcatctaaaaactctgactcttgtgaggctatcaaatcaaatgccagtagctcttcaactggtggtgagatttggtgctcatcttcccccacctgctccatactgggatttgtctggcttgagcttacaagggtctggtgtaacctggcaccatcagtatatgcccaactgttttattttgtctgcaaatactgtttccttgaggtgataaaccacctatgatttttacaacattttgcttcttcttccacacagattctggagccttttggggggagaggtgtggtaggtacattattaggctgagcactccacagtctctttgtctctgcatgttgaccagttaagggtctttgtgttagtttctgtctactccaagaagtttctcagttgagggttgagagatgaactgttctgtgggtatagaaataagcctactttgtccttttaacagaatactagtattacaccttcacctaggatctatgacttacctagccacaggttcttggcagcattaacagacccaggtaagagttctactcgtggaggggatgttattccaatcagaaactggttggttattcacatgtgtgctacagttgcaccaacagtgggcacagcttgtcaagccagtcattattataccatatggagttcagtgctgggtgaaatttatgactatttttctactttggtaatgtgtatagcacctttcggcactgtgaaagctagctagtatggttgaagcttccaggccagtgccagcttgatttttccatgttgtatgattcaagtgtatggtatctccagcaataggctcttattgtcacgttctggagggtaaccaagagtattggaaatagcctgtaatgcttgtgggtttatgggatccctgtggcccatagacccaaaaaggggcaactcattccaagaagtagggttttatttgctagcatatgctgtctagttgaggtattctcctcccaatgtaggctaattccattaaaactctattatatatgcatatgtatgtattttaggaagctcaatatgcattttcttcaatgaatctctatgcttcattatgtctcaaggatctcttccctcaagaagatggtacaaatttctaagaagcatcagcagcctaaatgaaccatgaagattttctgataagaaatcaatcctcctcatgacttttactaaactgtgcacattttatgcatccaactcaaaaataagccagcaatatataaacacagaaataatactaaaattatcatacacaactgcataaagtctatgagataagtaatctgttttgcatgtctttgggggtgggggagttttgctgctcccaggtaggactaaaatactgttttgcacaatatgtctccagggacagacttgacccggcagcaagggaatgaagaaaatacagacacatgtgtaaaagctagggttggctggattgggttctctgatggagaaaccacagcattctagaagcttaacaagttcattatatacagctgaacagagaggcagggctgttgcctacagctgaacaagggaggtggggttatctcagacagacaaacaaggagccagtgtttatggtatacagctggatcaggaggcaggtttagctactctccaagaagcagtctctgtaggggagcagtcgtcagatcataaacatccactgggaagaagatattgtggcttttttttttttttttctgtacgtactatcaacacaatcaatagggagacttggaaccaaaggaaggctttgccattattccataagtagggcccttgcctgggccaaactcatggtgacaacacacattacctttggacttcactaggtcagggcttcctctagtcctcacaaaaatacattccacagcaatatggcttcattttagctttcagtactgtttttaactgaagagtgatgagcagaaaacaagcataagatgtttggaataggtttaaaagcactggattctgcactgggtcagaaacttctttctccctttcagaaaaacttagctgaacagacactgacttcataagtgttggacataaaaaaaaaaaatcacattttgtgtggctgtgtccatattcagctacttatcccaccagaaacattgtgattcgtgttggagttttgtgattataaagattatttaggacttttgagtaaaagactttccatgaatatatagagaaatgggactccctgataaaagaatatcatactcagggctccaagtttcaagatatgtctaaatctaaagaagtcaatatttatatcctgtcaatatttcattaaattatgcttaaaaataaatcccctgccagggatactttcttatttgtaacctctttttttttcatctttttttttccccccagagatgaggactgaacccagggtcttgcacttgttaggcaagggctctattactgaaataaatcctccccacctcaattttttttgttgttgttgtgacagtttacttgagcttatggttctagagggagagtccatagtggcaggggaggtgtatcagcaggtggctacagaaaacaatgatcacatctttaaccagatgtacagagcagagagaccaaataggaaatcatgtgaagctataacccctcaaggccctcccttcgagacttgcttcacccagcaaggccccattactgttctataacctccaccaaatgttttttcccacttgagagcaagcattcaaatacctgagcctatggaggacatttctccttctaataacatataatttaattagctgacaaatgattatttatatttccaaatgaactattattgtgaatatccaggctatcacagagcatatattagaatcttactttgagtagtaacacttcaacttcttacagcagtcagtggctttaaaaagtacatatcagttttaggacttctagcttcatgaatgaaataaacacaatatccaaggacgcatggttgaatggattgcccatagttactaccaaggttagatacaatcttggtttgctcggtctccatcagtataccacgtttgtactcacatcacattgttctttgaaagaaagaggaaagagagggagagaagaaagagagaggaaggaaggaaggaaggaaggaaggaaggaaagaaaaactttagtctccagaatcatgttctgtagctcagtgacagccattggtacttgtctaggagaatctgaaaccacagtgattttcagaataatggtggagacatgactgttggtagaatggcaggggcaaagggagaaacaacatctcttttccttacttaaatttttactttatacaaacttttatatatttaagaataccatgtactgttttgatgcatatatacagtgtgcaatgttcaaataaggatagacatatctccccaagttgtcattctttgcagcaaaagcattcaaaaatccttataattatctttagtcactgcacttcacaccagaacttactttcctatcaaactgaaacttcatgccttgaccagcctttccctaccatctaatttttcccaacctttaataactattattctattctcagcttcaatgacacacacacacacacacacacacacacacacacacacacacacacacacacattccttgtgtgagtgagaacaagtagctccctctgtcttctgccttcttcccaccttcctgtagtcctgtctcttcctgtagtcctgtctcttcctgtagtcctgtcagcttgacaagggctgactacagttgatgtaggaacctgggaagcacagctcaagatggccagcctccactggctttacagagctgagctgtgaaatgaggcttacctctgagagatgtagtaactaagcagtttcctaaaacagcacttgccattcctaagtgcaatgccctatgaccctctgaaattagtattttctgttgtctgtctacctatcttcctccctccctccctccctccctccctcctcctcctccctcctccctccctcccctccctccctccctccctctctccctcctttccttccttccttctactttggcctcaatacatctcactataacatctcataattcacagtgttcataatgagtggaaaaataacaaaagacacacattttaaggacattttaccttcagctaaatattttgtgtttaggataggtgtcttagttactttctcattgctatgataaaatactttgaccaaagaaacttaagggagagtttattgtttacttacagttccaaagagaaacagtccatcatagtaggaagatacagcagcaggcaaggaaggcatgatgacagaacaggaggctgctgaccacagtgcctccatgtaaagaaagcagagagtgatgaatgcttgtgcttaggttattttctttttcatatatacagtctaggatcctagcccagggaatggtaccacccatggtagactaggctcttccacatggattaacctaatcaaggtcccccacaggcatgcccaggggctcatttcctaggtagttctagatctcattatgttggatattgagatttactatcaaaacatgtcattaaaacgtggatcttgtgactaggagtttatgtattatagtgtatcaatctatatacaatagaagtttccaaataatctctcattttttgacatatggattgtaaatgaatagcaatgtctgacaatataatataaaaatcaaacttaactcttctagtgtatggtatgcttgagtctgtgtgttcacagacatggagcctagaggtcaatgttgccaagcctcccaaagctataattataagtgcatgccaccttacctggctttatatgatatgcggatgctaagatcaaattcatgtattcatgcttgtatgtcaaatactttaccaagtgagctatctccccagctcccttcattacactttagtgtaagcattatttcatatattatactaatggtagaatataaaatgccaccactatcccctgcattggtgagaatttagaatagtatttgtaggtaaacactttcagggccaagagtttagtggattcatgatggatttatgattgctgggcatggtcaagaatagaaagaagatagtattcagacactttcaaaaatgagataaaaatatctggaaaatgtttctatctaagagtccatttaataacactatgagaattcttcatctgagttatgaatttgttagcattgacatacctgcgttgatgcttcataaaatccagtctttggaatttactggggttcactcttgggggtttactttatatgggcaatggcatagatctaccactacagtattagaaccaagtattttcactgtcctaacaacctgttgtattctgccagttcatccttctcctgactcccaacactgccaaccaatccctccctggctttttctgtcttcataatttgctgatcctggaatattacacaatagaaccacatactatgtgacatttcaagattgtcttcttttacttagtaatatataaacagatctgctctctgttgtctcatgactccataaccaaacagtccagatgtatcatgggttatgcatcaaaggccaacctagttccttccaagtttgggcaattatgaatgactattatcaacatctgtattcaggttcttatgtgatcgggggtttttaagtcatttgagtaagtactaagaataatgactcttagatcacttggtaaaaatatgtttagttttgtgagaacactcaagatgccttccagaagtagataagcactctggtttctctctatcctcacagcatttgccagtgtcattgctcttgattttggccagaactagagcctcgctacgttaatgtgcattctcccaatgacatatgaggtaggacacactttcacatgctgcttccttgtgaagcctctgaaggtcttcggctcatgtttaaatgaagtatgctacagtggagggttggctatcagcactgtcaggagctgtgaactctttcaaaggagggtgtggtgagttccttaggtcacagaagatactgaccttagaggggaatactgatctcttccagtgtgttctcctgacagtgtattgtaaatacctgagcttgtcccctgaatcttcttgcttcccctttggcaatgtgatttcttttctccatgcatgttcctaccactgccatcttccaagatgtgagatagctaagaggaccttcatcagaactgagctgatacccctggatcatgctatctgggagctaaacgaacttctctttataatttatcctgtcttggctatttctttatagcaatgaacaacagattgacatgggttattattttttgtttgtttgaggttttttttttttttttttttgagacaggatatcattctgtagtcctgactggcctgaaacttagcatgtaggtcacaccagctttcactcagaacttttgccccagtctgcttaggagattacaggcaagagccaccatgcctgactgactacaggttttccttattgttgacatgtgaacttttggcatactttgagtaatagtcccttttttttctgaggttgtaaggcagagcctcactgtgttgctctggatggcacagagctctctatagagacccaagttgaacttgtactgattctcctgcctctggagactacaggcatatatcaaacatgcctggcaattgaataattgctctttttaaaagcctttccttccttccttccttccttccttccttccttccttccttccttccttccttccttctttcctttcttctttgtgtgtgtacatgtcacagcctatgtggaggtcagtgggcaacttttgggagctggttctctccttacctcatgtgggttccagtgaccgaactcaggtctaactgagtgaactctccagctaaaatactagctcttcatcaagcatgctttgcagtttgttactatcttttcattctcttgacattgttcctttctaaaagagacacttttaatttaaatgaaacctagcttaccaatagcttctttcatgggttgtgcctttcatgttgtctctaaaaggtcatgttgtcttgtaggaattttatggttttgtgtttacatttaggtctgttacacattttgagttaatttttgcagagtaaatgttttatatttacatccctccctctctctgttcattcttctgttttccttcttccatgttgctatccaattgtcccagcatgatttgttgaaaacactgtgtgtgtgtgtatgaggggggatattgtgtgtgtgcgtgagtgcgtgcgtgcgtgtgtgtgtgtgtgtgtgtgtgtgtgtgtgtgtgtgtgtgtggtgtgtgtgtgtgtgtgtgtgtgtgtgtgtctatgtgtgaaggtcagaggtcgatgatcttgatgatcttagatattctctggagctgtcagctgtgtttctttgcaaaagagtttcttactgaggcctggggctcatggctagatttgctggctactagagccctagagatcttcttgtctgtgtctccccagtactgaggttacaagcatctgcctccattcccaccttttccatgggtgatgggcatcaaactcaactctttttatgaacatagcaaacacttaattggcctagctgtggtgatattttgtctatgatctaacaaataaagcttgcccgaaaatcagagtgcaaagctagccacactagttaaccacagaggccaggcagtagtggcacacacctttaatcccagcactggggaggcagaggcaggcaagtatctgtgaattcaaggcccccccagagctacacgaaattgacctagcctaaaagagaaacagagctcatgcaaaggtgatctcagcccttgcaatcccacacctttaatcccagcactagagaggaacataaggtgggaggagacaggaactcagtgcagagacaaatgtagtctaggcagtcagtctgaggactgagcattcgtctgagcattagtagaagtaaaaactctctattggctggctgctttgcttctctgatttttcagctctaaccccaatatctgactccgggttattttaattattactaccaaatagaattcatgctacaccgagccatccttccaggtccaaaacactgtttaaaaaaagatattgatattatctttgctcattttgtcaaaggtcagctgactttgtgagcctttcttgcctttctcttctgtttctttgatttctatgcctatattttgtgttgccaacaccacattgttttcattactgtagctttacagtaagtcttcagggtcctctttcactttttattggccattttaggtcttttgcatctctatataaactttagtgtctctttattactacctacaaaataattttcctgaatcaaggttggaattacattgaatttatagatcaagttggaaggactggtgtcttgaaaatatggagtcttcctgtcttgaacagtttctctatttagttcttaatttctttctgagttttataactccccttaaaaatcttatttgtattttattagatttacacatactcattcacattttttttagtagtaacataaatgataccatgagtttaatgacaaattccacttctttccctttgtatatacaaaggggactgacttttgtatattaaccttgtttcctgtgatcttacttaattgtatagattctacaggtatttttggcaattatttcttgttttctacatgggattatgtcatctttaaactgtctcaatctgtacaccctctatttccttttattatcttactgcattgtgcaggctttaaacttgtaatcagtgttcttctaaattgtcacagtttttccttctttcctggacaatgtcttccatgctctcctccactcttgtgatagttacatctccaggatttaaaaagctgtgctatgggacttgggagagagtttagacaacaatgcacttgccttgaaagcttgagaacctgggtttggtccctagactccatgtaaaacgctggtctttgtgatgtttacttcaacccagtgctaggggtggggcaggggcaggtaaatccttgaaactggctggccaactagcccaggcaacttggtgagtcctaaactaatgagagactgtgtttcaaacaacatcagcaaaaagtgaacagtgctgaggaacaagaccaacattgttctccgacctacacacacacacacacacacacacacacacacacacacacacacacaatgctttgctgtatatctcagataatacaatgccactaattatgtaacaggaagaaacttagaaatgcaaaagcagaacaattagtgaatgatataatcaccatttgcacatttagttaatttatattttgagtaaatatggagaagtccatttcatatcagtttgaaaatcctaatccaaagtctttgacaaccctgatgattggcaggaattgacaagatagcaagatgaacttcccatcaccagaagaggatctggacacatcacctcccccaagcccatctctgctctcttctggtgtggttcttcccaggaaagacaagtgatcttgtttaagtcaaaccacccaggtgccatttagtttcacttaaaaagtcttgggctaaatgatctataaggttcctgccatgttaaatgctgtctcctcatctacagattggtgacaatgttctaatggcacccaacacaagacatcatggttttacataaagggataggtataaggcacacatcacagcactaatgcagacaaaacaatcaataaatgtattcaacaaaccaaccaattaacttttcaactctataagaagttagaagcggaaattttctatatctcagaattctactactttgtaaatgctaactgtcattggccctttctcttaataagtcataacactccttttcatttttttttcagacaaattttattgtctcattcacagacctggtcatgtcccctcttgtgtatcttctgggagaaaacctcaagattcaagccttctcttatgaagatttgctttgattttatgtggtgagtgttttgcttgtatatgtgtttgtggaccacatgcatgtattgcctgtggaggacagaagaggttattggattccctggaactagagggatagaccactgttgagtcactaggtaggtgctagaacttgaacctccgtcctctgcaagagcagcaggtgatcctaactgctgagccatctctccagccccaggatggaggccttcttgctttgtgtaccctttcagaatccttagccattccagggctcacaatacattctgcaaaagctttactcctctctaaaatgccatgtctcacagcatgggcaatagctccagagccagactattcaagtggtttgctatcatttgaccatatctagagcataatccaccattttatctaaaattgatggctccatcaaacatctcatttgctgtcaatagtttttatcatatgcacatctcttttgtgctgacaatctatgactgcattacaaaaagtctgattagtgggaaaagtcacacataattccaccagccccacccattactatgattatttgttttctttccaacttttctcactacatgtgttatgtaccaatgtaatctatttccaatcttaattggatcttgcttgtggtcctgactaatccatgaggattttccatgtgggaagccttcatagcaggtaattgtgttaccattctgtttccagtaactaccatccagttcagtttgcactctaagctgacttcagtcatattctcagcactgacttacacatctttcacaatgttccagtcctagcacctccctagtggcttacaatggtctgtacctctagttccaggggatccaacaccctcttctgtcctccgcaggcaatatatgcactgggtgattcttcatgcactgaaaatgaggtccagaccttcttactaagcaccagaggccattttcaagcaggaatccattctttcccacctcctgtctctcagaaacttagtttattttgagacagagtttctctatgtaagctttggaggctgtcctggaactagctctgtagaccagactgaccttgaactcaaagagatccacctacatctgctaccctagtactgagactaaaggtgtgtgccaccaatgcccagctcagaaactttttttttagtgcaaaacatactactgataactccctgcacagaaaatcaggatggcaatttcctagctatctctcttcacaacagtcttacctgcctctaatgcccacttttccttctacatgttgtggttactctgctctctctctctctctctctctctctctctctctctctctcatatatatatatgtacatatatatatatatatggatatataatgcatataaatatatgtgtgtaatttatttatttgcatttaaatctttagttctcttgttatggcatgcacatgcacacacacacacatcatatactctctcctctctctctctctctctctctctctctctctctcacacacacacacacacacacacacacacacacacacacacacgtagaaaccaaaggacaattttgctgatttttctcttctactatatgggttccagggattgaacttaggtcatcagccttggcagcaagactttttaactatggagccatctcacaggccctcgggtatctttttaatgatttccacttggaagcacttaacaaccttcagggtcgcgtcttgtacctcagggcatcctcaaagctcaacacaaagggtatcctcaatacatacttgttaatgaagatgacgaaatgatgaggtccactgtcaacacagctgcactcccttctgtgacaagcaggaagcaatatgaaaacatcagggagaaaagtcactcgggtctcttaaagtgcagtggaaagtcccaggagatttacgcatattttacttgacaggcacagacatagtcaatggaagcaaggagaaggaggaagtgaggtagggaggatggggaaaagcaagggagagagaaaggaggagaaggaggggaagaaaaagagaatggagaaagtaaataaaagaagcactactcaccgcgcatccgcacacactgtatttcaccttactacagaagagataaattgcgaagcattctaaagctagaagatctctgtcacatgatggctttaggcctcagctcctaaaaggaaaaaggtccaaaaatacaaccctaggcttttccagtgcactttagtgtctcagaaacccaaagcatgaagaagacccaaagcttgggctcccaactgctgttgcctgggatgcaactttactcttggaagaactgcttgcttgaccaactcttctatgctttattttttcctgctctgaaagagtgacagtctcaggaatcttagaacataattaacaagcagctttcttcctcacaatctctgatttgtagtgtaagtgtttctgtttgtttggttttgagagaaggtctcactgtgtagccttggctggccttggactcactgggtaaaagcagctgatagagatcttcctgccccttcttcccaagtgctggaactaaaggtgtgtgccaccaagcctgccttgtagcatatgttcattcctatgatgtaagtattcctagaataactgatttcaaactccaccaggctcacaaaatgcctggaaagctagcagttggcttctacaggtacctcactaacagggctgttgtgaaggtgaaatcaatcaatgcatacgaaacacctagaactcactctggcataccatgcacttggtttgatgaatattagctattttgggcttaccatttagtgtgccctcttctatggaaatgggggattgaaatagtatactgaaaaaaaccagttgccttgaatttagttcgtgccagcctcctcttaatcgcatgctttatgttcacgactgccaagcagccccattgacttacttgatttcctttccttgtctttaattcatctttttggagcattctaagaatcagaagactggcttacagccacataccaggaaagaaaagggtttataaaaaatatggataatcccaaatgaataatttttcctgaataaccattttaagaaatgcttaagtactaactcaactagctgcagaagtttctttgggtacgataatgcattgcccattttgaaaggaaatatgaattgtattccaccaagtcttatttcaaaataattttactccctgatattcttcctgacacaaaataaataagaatttttattaaaaagaatccccaaatatattactgcgagcagtatgactttctgccttttgattcctatgggtatttccatgactccaccaataaaatatctgcttaggaatatcatttactggctgctgcatccaaactaatagttatgcaataaatatttgcaacctgtagaaaacatggcagtttttgatctttaagcccaaacttggccagctgacagctctattcatcacgtgagaacccaacactcggtcatttttctacggaatgcattgccctttcttccttacctgttttgtgcggccttcctcctacacctttccaagtccttcttggcttctcccactcatatatgggtcatcattttgcttttgtgatttttagtctcttctcagccacttcctgagttgtccctttcctcctgttcctatgacataatttgttacttctctacagaatactgtatttcactgtcatcctcagatgtcagggaaatgtcagattatgaactttactgttgacaagatgcgggaggcggtgagaaaccaaggctgccatcaaatgaaagtgtctttcgaattctctccatttagagaatgtagaaatgtctccccataatttgcctgttgttgccacccattgcccaggatcccagggaccatccttctgctttctgattcagtgaatttcactgtcctagatgtaaatggaaccatacagtgtgtatttgtgactggcttgttgctgttagcatgatgacttgatgtttcttgcatgttgtacattggatagatgtccttccctttgatggctgaattctatagtattggctgaacacatcatcttatttattcatttatccatcagtttacaaagaagacttccactttggctaccgtagatgatgttgtgtggtgatatgtttatgatttaataaagccactgtagatcaaaacacaaagctagccacagccatagagccaggcagtggtggcacacacctttaattccagtgggagacagaggtaaatggatctctgtgagttcaaggccacactgagctacacaaaatcaatccagtctaaaagagaaacagcttatgcaaaggtgatctcagcacttgggatcacacacctttaatcccaacactagaaaggcagagataggggtgacatggctgggcagagagaagagtggaaggtggaaggtggaaggagccaggaactcagaggattgcagtctgaagtttgggggaaagcattgtactctaaggattcctggagacaggatcacccattttggtctgaggtagcagtaacagctagctacacttctctgatgtttcatcctgaaccccaatatctgtcactgggtttatattattcattttacaatgctatgaagggcgtgtgcgtacagatctctgctctaactctcactttcagtcctttgggaagatagtacagtaaatttattttaaaatcttttataattttaagttttgcgtttattgatttgtatgtttgcatgtatgtatgtatgtatgtgcgtggggggtgttgtatatgtgaaagtaaaagaacaattcacaggatttagttctccccttctaccatgtgggtctcagggatgggactcatgtcattaggcttggaggaaagggcctttacccactaaaccatctctctagtcctctattgctaatgtttaaggaaccaccataatattctccacaatggcagtgccgctttacattcccatcagcaggcgcaaggacttttgatagaatctctgttggagtactgtaacaagcattgtttctaatttctccacattctcaccagcaccactgtttctcctttctttctctctttctcccaccttcccctccctccctccctccctccctccctccctccctccctccctctctcccttccctgtctttttcttcctccctccctccctctctctttctttcattcattcttccttttctttctttctctccttccttccctccctttccttcttttcttttttcctttctctaccctttctttcttcctttccctttcttccttcttttctttcttttttccctccccttcctttcttttaaaaatagaattcagttgtctgaatttgcttttctgttgctgtgaaaaaacactgatgaaatcaacttggggaagagaagagttcatttggcttatctttgagaatcagagtccattattgaggaaagtacattattccattattgagtccattattaaggcaagagttcaaggcaggaacaaacctggagcagaaactgaagcagaatccctggaggaatgctgctcactgacctgctccccaaggcttactcagtttgcctttttatacaaccaaggccatctgccttagggtggcaccatctacagttggatgtgtccttctacttcaatttaacaatcaagaatcactttaggtttcccacatatgaccttgacttctttcaaggtgacaaaaactaaccatcacaccatcctaatggaaatgctgtactaacactcattactgtttgtgacagtgctttgtacacagttaaacaaaaatctaagagtatttcatttctaccatgtgccaactcaattctatcttcatatttttcatagtctcttgacatatggattatcaccaactcatttttttttgttcttcaaaagtacaagcacatgttttgttttccaagaccagtctagagactacagaatctatttaaattctttgatatgcttgctagtaatgatttacattttttacccttggtaaaagtcattctgcctgaccatctaggtctgagaaacagctgtctgcagccaaaaagcaacgggtgacttctctttgcactacaattaacctgctgaccttttggcttccttttcatcagttctattttgtgtaattttatgacttcaatgtaaaatatagtgagttgaacaaatctgccttctagtgaaataattagtacaactatgacatcgaacacgttaagaggccccaatctgaactctatgttaactcaataaaaccctaggttgtgtacattattgttaacagtcacacgaactactactcataggttattaactataccatctcacatttttatgcatactacctaaaatttagcttagtttattattggtagagcattcttttgaagataaaaaggagacaggaggcttgagagatggcttagtagatgaagtgcctgcctgaggaccggagttcggatcctcaaacacccacataaaacccaggcttaatcccagtcttggggaagacaaaacaagtggatccctggagcttattagtgagcttgtctagcccatcagtgagctccaggttcagtgagataccatctttctaaaaaatatggtagaaacgtatcgaggaagatgtcttttggcctttgacaccacacccatatgtataactgtacactatacgagtgcacctacactaacacatgcagcacccctgagaacatctacccaccccaaagaaaccattcacatggagaaggattatttggagaggcattgataggagaggaaagagtagatgtatactaaatgtccatacttgggagtaacactaggatgttgtgatgattggttttaaaggtcagtgtgacacaatccagaattatttgggaagggagtcttggtgagagactgcataaatcttggtggttttcttcatctgcttaattgaagtaggaagatccaccttgaatgtatgtggcaccatttcatgggtgaagccccaactgaacgaaaagaagaggaagctgcccctaaaatgcatgtgttgcttggtctgcctacccgattgtagacctgatgtgcccagctccctcaggtcccttctgtcttactatttgccatctacacaaataccactgtttcgaaagttagcctcacactgtgattaggcttcatatagtttgtcagttttcctttaatttaatgttttaattagaagtcctctaacttggtttgaaatgtgtatttcaaggtttctgtcctaaatatctcagttcctatacaatttagttccatcttgacatctctgaaacttcattgttgggaactaacccaatactaaaataatgtcttctgtagagtcctttcagatgactggatcatctgaacaacaatggacagttttccctaaaatcctagtagttctttccatctaataggctcccaataatatttaagattataaaatattagaactaaaaaattaaacacccatcagcaataaataagctgaacctcatcaaagttaaaactgttatgcttcgacggactttatcaagaaaatgaaaaaccattccaaagactgggagaaagtatttgtgaaccacccgtctgacagtggctcagcacacagaagatacaaagaccccttacaaccccttcttgcttctagatagcaagaagacagacgacccaattaaaaataagaaaggatctgaatagacatttctttagagaggtatataaatggccatcaattacatgaagagaaatttaacatcgttaataaatgtagaagtgcagagtcaagccacaataagatatggcttcaaactttctagtatgactaaaataatagatttttaaaacagaaaattgcaagtgttggcaaaggtttaaagaagcattagaaccaaaaacccccaaaaaataaacaaacaaaaaaagaagcattagaacccatagattgttggtgggaacacaaatagtacaaccactgagaaaaacaggatgatggtagtttcttattcagctaagaatagagtcacccagaattctatttctaggtatagtccaaaatgaattgaaaatgctcaaaaagaaatttgtatgcaaacattcaatattcatagtggctcaaagtgggagcaacttaaatatccaacaacagacgaatgaaaaagttaaatggaacatatagccatctaatgataaagtatttggcccttacaaaggagtacaagttcatgctatgatgttttcaaatcttgcaaatgttatataaaagaaagaagcgagacacatggaccactcatctttttaaaaaatttaattattttttaaaaatttcatttcatattccaaccatagttctccctcccacccctcccccccccttgcctccccccaccccccactcctgccaatgggtaagggctcctcccatgagaagtcagcaaagtctgcaaaggccactcaaatctttaggtttcatttatacaaaatatctagcataaggaaatccataaatactcagtgaaaatcatttgtcgagagagaagactgggggtgactgcttaataaggatggggtggtttcctttgaaggtgatgaaaatgtttttagactaggtagctactaatgaatgtacactgttcttgacgtaatgccaatgaattacagttaaagtggtaaatttcatgttaaatgacttttacttgaattttacctgaaaatcttatagaatattagtcgctgtctatgtgtcagacacagcgggtgtgaaattgattgagatattactgctttccctaggcgctatggttctcaagaaactgacaactcaaatagtgcagagtgctgggatgttccagaacattcatacagctgctaggggaacatgccatcttgggtgatagtgtgataatgacatcacagccttccaaaggaggaaactgagcaagattctaggaggatagattggggaagcagtttattctgcatgttcagagagctccttttgtgggacaggttctgggctcagtcaggaacccaatgatggacaagcacggaggctatctatccattactcatgggacttccttgtgggatgacaacacacattaatcaagttatcaactacccacactctgaggcgaatgtcaggaagaaaaacatactactctgtgatagtgtaaacgtaaaccacctgtgaacttgggctgggagactcctccttgctggtgtccgcaggtgctgtgaggttgctaggcagaactgtcatctactgtcttacacgatataaactactggaaaatctggcttagaaaccctttattcagaaaaccttagttgagtatgtgaatttatcgttttcatttgaatatactaattgtataagcaatgagttctactgtgccattttctattttttaaaaccgttatgtatttgtgaatatctgtctgtgatgtacatgcatatgtctgtgggcacacacatgctctggcatgcatgtggaggtcagagaacaacttctgatgtctgccctgacttccatcttgtttgagccagggtttcttgtttgccactctgtttgctaggcaagcttgcccccaggatgcaggggctatgtctttgcttctcatctcattgtaaggatcacagattggtgccctattgtctggcttttacatgagttctggggatgcaaactcaggcatgtatacttatgcagcaagcgttttattcacggagccacatttccaccctcaacatattttcatacaagcacatgaaatttcaactacatccaccactatcacattatccctaattataaggccacagtccctgggctgtaagaattcctgcataccgtgttatcggaagagatggacacacattaccactgtttgaagctaactgagaataactaaatctgagaaggcaatcagagaaaaagtttattggatgtgtaaaatataaatagtctgtaaatgtttgtgaaatctatacatatcttagatggctttgtctgctaatcctgattttaaaaattagagaaaggtcatatatatagtatatatattatacatattatatattttaatatatatatataaaacagatttcagaatttgtacactccattttttgtttgtttttttcaaacagggtttctccatgtggctctggctgtcctggaattcactctgtagaccaggctgtccttgaactcacagagatctgcctgcctctgcctcccaagtgctgggattaacagtgtgtgccatcatcacctgcccagaatttatacactaaacaaattatgtactagcctcttcttatggaaagtactgcagagctgagggattataaattccctctgtgtcaggctactttgaaactagctgaccttccagttgctagtgtagtagacaagagtgagagcccatgatgggataagtaacaagggaagtctgagagggaaagctaagccaggtgcctagggtagcaggaacatcagggagcttaaattctccctctgttcctttgcatcctctgctcttctggctattacacatgcttctgctattttcagggatttggcactttaggtcttatttcaaaaagcattcttctggttacatgttgtaagcaggaacacaatagctttagagccacgtaccgtggcattcttggctaatagggctgcattcaaaaaagctggatgaacttgggtgctaagatgtagttaatagtgaggcattagacaatattgagcttaatgtgatcctccaactgttttctttgcttggatttcttcttttagaagcacctgctatcccctacccttaaatagtttatatttatgtatgattatagtttggtgtgcatacatagggtgggtatgtggaagctggatgataactgagggatttggttctctccctccatcatgtacattctgttctcaggactgaactctcggcatcaggcgtctggctggttgagtcacctctctgacccatgttctttgtcttttcttattgatgcagtcaatttcagtgaaccccaagtattttttgggctcctgtgattccattttcccaacaccaccccccccccatgttcactgggaaaaatccctacataaccgaggatcgcctcatacatctgatccttctacctgtacctccagcatgttgggggtacaggcatgcacccccatggccaatttatgggcagatcaaaaccaagcactctaccaagataatgccatccctagcaccctcatcttttttacttttcttggaataaaagtagagcctccctgggtttaaaaaaaactgcttttctggttaatgaggaccatacagttttatttctaattatggtagtccctttgataatgtcatgtttctggaagagattggaaagtttgcatccttaagtgccacgccagcaaaacagttgcagcatatattaaactctgagtaattataatattctatcaaattcgttaggagcaggagagaggctttggcatgaactaccttcagattctcagagagcagcacaggagagcatttccatgcaatgtttaggagacagggctgggtagagaaagctgtggtttagagcttgtatattaaaaggaaccctgagacgagcctaggagatgcctttctcggctctgcctgcttgaggatttatttatctctctttcttaaagaataaggtgacctttcctcacttctttggtaaacatgaagaatcaaaaacccactggtttagaaggccctgctttggatcataagcctctgctgtagcctgtgtatacggagtttctgtggacttttcaaaacacattccccaggatctctcctctgcagattttgaatcgtctctgggagatcctatgcctttactggtatcttcctagttggtccccctttattttcatttcactctgtatttaaccttaccctgataaacagaagatggtttggcaaccatcttccccctttgaaacccaggatgagcagtacctgccttatcatcagtggggattacaaaccaagctaagaaggtgccctttacatgtggaagcactggctgtgctaattcaggttaggcttacttctaggaagaggccagtgtggtaggacagaatccagatggctggcctgcatagccacacatgacctttgaactcagcgtcaacatcttgcaaatgagatgtgaggagcaactctctatctgaggcaggctgagcttagcgccaagggagtgattcctaggctagaactgcattcacagcaaggcagtgaagagcctacttaggaaagaaaaaaagtcaacagatacttcaggattactaatacagtttaaagtgttcacgtgagcaattgggaaagaatagagaaaattcgaactatgaaacttgtttcacgtagggaacctttgccctttcaggcaagaggcagtagaaacatccagcacaagggacatgtgattgagcaagagattaccagttgcttactcagtatcagggaaaacatcaggttgggatctcgacagatgctccttaagaaacagagagttgagcaagaccctgtgttcaatctttaacactgaagagagagggagaggtgggggaaggatagctaatacaaacagatcagactcacaacaagtttggggagttagagaaatggctcagagggtaaagtgcttgctgagcaagcacgaagacatgagtttggatatcccttacctccaagttaatgctgagtatggaggcacatctctgtcatctctaggtggctcaccccttggggctcatgatatctcaccccactggccatgaagcttcaagttcaatgaaagaccctgtttcaaaaaaataaggtggagagtagaagaaggccctggacaccagcctggcctccatacatgcctgcatatacatgggcacacatatacaccatacacagatatgctcactcagtaaaaaataagtatgcatcatatctttctaagagaatccacacaaggtaaccgtataatggagagaacactgggttttgtttgttgtttgtttgctgcagagctcaaattgaccacaaatctacaagcttcctgactctgcttctcttgtactgagattacagagctccagaaactacttctgatgtttcctcaatctgaatagcaatatctactcagagaccctgggtgggagcaacaaaagcacagagaagttacttttgtcacaaatatttgtaagatctgatacaagaccatggctctgacctgtaagttaagaatgtttattgggccctcactgtgctgacaacatgacaccagatgtaattcctttcctaaggaaaaccctactctccacagggttttgtggcccatggctgttctgcctactcattggcaaggtaggctttgaagttctgagaagaacttatggaggattaggagtttctttctaataagatctggactaacaatgacagcaaaagggaaagctcccaaggattctttacccaaatgccacctcactatatcatccaatctcagattctcccaccacgcacagaccttgttaccccctatcatcactcttgctcatttctacattaatactgtcactacatcagacagttggcctattttgtgatcacctgtcttatacacttagacacattctcatgaactgagatctttatcttctacccttctgcagtgtcccaacaactggattgacatctggacacggaagatgctcagtaagtgtttttaggaaggaataaataaacagtgaagggttatagcagataaaggcttagcaacatttcctcagatagaaaagaaagtgactaacacttgggaggctgaggcaggaagatggctgcaaaattgagcatagcctggtctagacagtgagacatttgtatctcaaaatcaataaaacaaacaacacctcccccctaaaaaaagtgaagagagactgagaaagaagacctacctgtctcatcctgtggaggctatgcctgggtatgtgtaggcctcatctaatatctcagttaggtccttctccttagacagatagctttgttactaatttactaatgtacctaatataacacactgcccgggatctacagagtttagctgaggggtgaacacgaacaggacacatttcttctggagccttccaaagacaggtgctcatggaacatggagacagaattacctactttagaacatccaccgaacacaaagtaactgctgcagattggatgcacattttgtcctcaggaaccacaggaacagaagggaaaatagcttatttcttgcagaagaaacttctgaaggaccccaatgtgcctcccactagcattccatacagcatctccaaaagcaggaagagtggtgggtaatgtacatctatctcggtttcccaggatcctgccagctggttcccaattgtgttcctattgagaccctgctttcctcctaccttgggatgccttcaagtaagggtcagtttaactccaggatcactgagaaagctactgatgtaggcttggttcactatcttaaccctttaagggtgtcactgatggtgtctaacagggtagagtgtcataatgacctgaccttggaaatggtttggtgagagccgagctcgtgactcctattctcactcttcatgcagtttgaagatttagcccaatttccagaccatctcctacccaggcttgaaaatggctttatttcacactttgcggcaggaggtaagtgggtttctatgtgaaagtgatggtgccaaagacatttatgaacattaaaaaatgtctgaacatggcttagagccactcagcctatttctcatcccgcgccatgccttgtggggcacatgtgagttcagagctctctttgaaatcagtggcagttatgagcttggagcaactctgtgggacactgagcaatataataaatgagcccctttgaagcccagccattgtagctggcctctttctatgctgtatgccactgatttctcgggggtgttctgtgggatgggagtggctcaccaacacaatgccctctgggtttcaactttggtcttgaaagttgggaagggcctaggaaaataagtctttccatttccttaaaagaattggcctaaagcctttgctatccttttgatagcaacaactgtgataagccatccaatgtccacacatcttcagttaaaaccaaaccaaacaaaagcagcctttcccctacctgttcttatagacctatgcagcagcaaaagcaggaacagttacacacgaaagaaccccaaactaaagctcagctatcatctcttaggagataaagcagctttatttgcatatagggaatttttttccagatccttaatttaattaagaccagggaatataaacagatagtttttacgtttctctgagacattgaaggccaaactgatgttctgaaaacaagagattttttaaggaatgatatcttttaaaaacattattttctgtgtgtgtgtgtgtgtgtgtgtgtgtgtgtgtgtgtgtgtgtgcattctacagtacatgtgtggaaattagaggacaattataggagcctattcttttttccaccatgtaacttctaggaacagaacttaggtcatcaggtttaactgcaagtgtctttacctgcagagccgtcatcttaccagctgaagtatggtactcttaaagcagtactaaaacttttagtttttacttttggataaatattttccaagtggatgatatcattatttccactaagtaagttcaacgaggtaagtatacccaggctggtcacctctcactatcatttagaaggcagaattatttggcccaatttctcaagtccacgtttgaatgattgtctgctgtctcgagtataggatgcagagccagataatatttgctgaagctcttctctgcttctcatagctttcttgacttctagccagcatgcgagccctacttagcacggagaccagagagtcccagagtagagctggtgtgtaaactgaggccaagtgaccccaattgcagaccacatcccattgcaaaagtttagtcttttcttgagcctatagtctaccccaccctgcaattatagtgtggtatttatctacaatgcaaaatagggaagcaaatgttgactcaaagctaagctgaagcatctaggaagcaggcactatcatgtttgctattgtataggtgaaaaaatggaaacccagacaagttaacagggtcaaggttaagttgctaatgatggatgtatgggtacattatgacctagaggctgtgtttttgccatctctatctctgtaccaaggaaacacatatactcgctggtattgcttatgagcaaccaattgtgtcctggcatttaggtctaagaggaattctcttggggccctcatgagaggaacacagatggcacagagttgaatgtgtctttttgaacacccttatgagatgctaaaggaactaagacatccaggactgtttgttgcttagtgggttccccagtgtaagccaaggcccaacgccaacacacaatttagtaaaagtgagtaacagttaaaaagatcaaaatagaatggctcaggcatttagtttggatggcttaccttgatcttgagatgtaatctaaagtatctgaagagatggatggacttcatgtccttcagcaatcctctgtggactctccttagctgtaaacattccacaagcactgctctgctggggaaaaaaaaagaaaaatcacaaccatgcagactggagaccataaatctggattgaaactaatctcagctgtgcctttaatgttactcgccagccctattacacgttcctctcccatgtccctcagctactactccaagcctttcgttctcgtcagagtgctcaatcttctgtcctcaggatgaccttgatttgaattgagggacttgtggcattcaggagtggcttctttcatttcaccattcatttgccccaaacccatcattacctgctctattctcctcttataatcatctctagcaactccacccatggggctaaggacattgttcccaccatatggatatcctcagggaatttgcttcatcagcgttcttttaatgcaatattcctttagttattcttaatcctcaaggaggttcctttttaagggaagcaaagaacaagcagatgcaaacgctacactgattttagtcttctctctctcaaataataaccatttaggaaatgctacctgaacttgccatctgtgattccacatcatctgttcaccatttgacccactccacttttgttctacccatttcattgcacaggctgccttgccttctttacctctgaagccaacaccctgtgtatcgttactcttctgtccttagaacgttggcttctatgctgcccatctcttcactgtctcccactctacttcttcacggggtgtgccttgttggtttctttcctctgctattccctaaagtcagtgtcctcactcatattattcacctttgagaaatgtccttgtcaatgcttcacatctaaatttatcttgagtctcttaatctctaaggtttttctaaatcattccatgaagatgttctatgggccatggaaactcaggtagtacagagattgcatgctgtttatctgtgctttggtgccataaaacctattctttctcctatttatattagtgaaagtctggggccttccttccctttcccaagctgtagactggagagacttttgctcctgtctcttatctaaacaacacactccatttattattttccttgcatagtgaaatggttatgattaagctcacatactcccttagttcctatagtatagtcctcgatctttacctgatctccaggaattaccacctctaatctccctttccttggccttggtgttaaaatactaaaacttgatcatgttttttccttactggctgaggtatggctttttctctatgaaaataatgtaacatgtcccactccaccaccatcttagagtagatactattttgcccaggtaaccatgacaacgaattgtgcaatactattcagacatagctttgtgtatggtaatagtaatggatctgttgatagttcctagtagatggatgaagggatgaatctttactggtagtccagccattactttggcctggaagtgaatggctaacttaagggggcactccgtgatggagcttccatgagattctcatgatgagtgggactttattgtgatgcaactgcctgggcatcatccccactcctgtaaatgtataagtgcccatgtctgtagtaagccaacctcattggttcttcaagatggcctttggtggaatgttacttggtctgtctttattgctctacctgggtggctagacgcttgttcacatctccctaggaaaagctgacacaagagtatcccatgactgatagcatatagtttaaaatcttctgtctgcccagggactacctattcagtcatgtttcttctacctctgtgaggatttctgggacagattagatgcattattctaatctgtcactcagctttgggcatcattcaatttagtatatctcattgttttgcctgtttgcaagtctgatccttcacttgtttaaacaccttgacagcacacccttgccttcctttgagtagagtggtagctactcaataaacattgagtgaatgaaggtgtgtgtgtgtgtgtgtgtgtgtgtgtgtgtgtgtgtgtgtgtgtgtgtttgtttgtgtgtgtgtgtgtgtgtttaaagtataaaataatggtaagtaggaaaacatttatccagggaatcaaaaagcattatcctgctaaaattaaagtcagcagtgtcttcttgattatatacataacccctgagacacacttagggatatatcctgaccataatttgtgctgcagtcagaatgtgttttgcgaatcactttcgggacatgcatttgtttgtagagttctatatcatggtgatgattgtgcttaatgcccttgaccaggagagtccagcttttgcaataaattagctgaagtggatgctgggaaagggatgaggtaaggaggcacacaacctgttttgccgagacactttcctttgtggagatggcttttggaatttcttccagcagttcccttagctcctatcagatacatttcaaacattaatctgagccccaccagatgccaaggtcaaagattcaaggcctctctctgggatggcattgcttttcactcagtctccatgtgcagtgatggggaagacctgcagagttttgttttcaatgtaatgtttttttcactttctaattctgtgaactttctctttgattcctatcaccccaacaagagaccagtattcaattacttcttagtggctctctctccctcccaaaggaggtatctatgtagactttcaagatcatatactgagttatgaaaagtgataagatttaccaggaagcagagataaaaaataatgaatagttccccattgcttcaggaacaaacaccttggaggcaagtggcttgttatggacacccattttacaaccagatatctggggtaaacttcttacattcataatttgggctctgcctcctgcttgactctaatatgtttatcatagggaaaatgaaactctaatataatctgcctaatatagactgcctagtctagtctctttgggttttcaatccccacatcacttgttacttcagtcaatatacaactagcaaactattagaagtgtattggctgacatcttcatctttgcaacaatattaacttgatttactggtggatgaagctgagcctagagcatgcttcattcactggaattttgacccggcctagagtttcattaaaatttgaattttaatggtcaacctgtattttaattattaaattcatttaacttccattttaaaccttaacaccaagttactaattttgaatcaagataaacatttaaaacatggaagttagagtcagtaagatggttcagtagtggaaaagcacttgaaaaaagcctgatgtcctgagttggaacccttagaagccacctaaagaaggaaggagagaatggacttcacaaagttgtcctatgacctctacctacatgctctggttcaagtgtgtgcacatgtaaggcatgagcatgcacacacacacacacacacacacacacacacacacacacacacaaataacagatgaataaaaatttaaatgaaaaatagagcatagaagaagtcaaattgcaagaaaagatggaaaaggctgattgccaatatcatttcaggtgagaaatgtatactaaagcaagtggtactagttggtcaagaccaaaagcacctaaacattttaaatgctcaccttctggctaagaagtaccattaagagtcagaaaacaccaggctaggctaatcatgtcacttactcttatctgcttagcaaggttagcctaaggatgaagtgtggtaccaatgtgattgcttttttgccagttatgaagctcttcctagggcttggagaggtgactccacttgggctccaggatgaaaacctgagttaggttctcaatactatgtaagaagctgcacatggtagcaggcatgatgtaacatcaagtgcttgggagatgggaggaaggatccttgagctttctggctgccaacctaggtccaggttcactgagagaccttgaatcaagggaataaggcagacagtgacaaggtaggacatctgatgtcttcctctgtctttcacatgtgcaggagcacagccacccacataggcacaccatatacacccccactgccactatcttcaaaatgtgtaatattgccagaacacctatttcttagaaggttagatttggggtcactaatttctactgtggctccatgggctgtcatgcaataggtttcaggaaacctcaggttttgatgggcactgaataggttgtccccataagaataccaaaattataccacctgcagagattttatttgctttaaaggccaaggatctttcctgattttcaacatgcaaaagactttctgtttttgaaacaataagtggcactgacatctctcaagactgaaagcactattgtctcatttgaagtaccaccttattattaggtgaggatgctgttgcaggaatgaataattagataactctttgtgggcacatttgattcaggtcccagggggaatatacaattgtaacatctccttggattatttcacaaacatatggcaaatgaagcacctgagccagatgtacaagcatattccagtatgtctgttttaacttaaaactgtgaaatacatcagaaggcgaagctattttggtcttgaacatccatcattggaaatagtatggcagcatctctcctttgttgtctggtttacctggactggaaataattaagaacaaaatagttggggagtcatcactcccagcatagggttccaggcagagttcaagacctaacgaagtatatggtgtggatttacatgggcctctgctgtcttcatatcgtttattcatgtctagtccccctgttcactgctggcaggcctggaatctcaacttacccatgattattttcattctctttccttatcgtgtgcactcactcccctggagatgcatatgtgtaatttaatatggaattttttaataatgagaagtattctgtactgattcagtagggagtttctgttgttgctttttttggtgaaagcctattttattattacaacaccggtggattatttttactaaagaatttttatctgatagtgacttcttgaaatcacactgatcaaaaaagaaatacctttctcatttgctagtggaaatgttgtatttcagcaagagtggcacgatttttaatctgactttcctatgtcccagaattaaaagatgccaagggggctcttgagtgtatgtataataccactcttgatctaagaaaatggagaaaacacaggcattgacaactgtattttcccttttgtacatgtgtgtaaattccatcagcattaatgggcactctgcccctgtttggaagagaatgtgaatcaagccaggacagaatctaccaccctattgaacctaagaggcagggactgtgtcatcctcttacactcaaagcaagaacaggaaatacatattgtaggcacctactgggggaagggtacttacttttacagccagtgtagcatagagtggagatttggaggaggagtgactatggctggtgaatgttgaagctgacaaaggaggtctacagaacctcagagattctggtttttatgttgcatcaaaataaggaattaaaatatttatgagcttgattctgcctctccgttcttccctcctttacagtggcagttccctgcatgacaacaggtatagctgtgcagttcagatgtgtttccagtctactaggagccaaatatgttgtgcacctgtgtttgctcggtcaccctgctgttgctggggtatcttaaagcctttgctccaaaataaataagaggcaggggatggagggtgggagaggacagcaagactgcggttttcccctgcttcccccaccccctttttaaaaatttcttctcatttggaaagccttagaacataggtttgatttcaggtggaggtgttaggattatccacgcagagataccgtgaatgccaaggtggagctgcagcagccccgtaaccctcgtactctacctgtctcccggggatgcggctgtatttctaagacatacatctaatattgcagagctgctgaggtcagggcactgtcagcgaacggtatcagcaaacaaccacacaaacctacgccacacagaagaacctcctttgtaaaaccactaatccaccaactcttccctggacctgcgggaccaccagtgtgttcatgaccctggacctcagccagcgtagctctcggatgagtctgagaaatggacttttagcattgggagagatcacagaaagcgagacaaaatgactagcaactaaggccaaaacacatcatagaagcatggactctgccctcaccgccacagcccctctgaagatttaaacttctgatagtaaaagcaataatgctctgaccttaaaggccagaggttctgttgccaggagtcatttaaagaatcattccctagcagccctagtaacaccagcctggcgactgccgcagcaatggcggtggcaaccacgggaactggagttcagtcatattggcacaggattctgaaaaggggtgggcaggcgggagggagtctattggcctaaaaagctgaaacatctgctggagttattaacagctttttggctgagttcagcagcagggcaccttgtggttgatagattcttctctcagcaattcaaaacaatgcagttaaagcaaatttctcatttttcagaacacagcttaatgaggcatacagtattttaaaaatagtcccacttaaaatggtcaatagcagtgagtgcagtcggtggtaccttcagttctctgtttccttgttaactttgtcagggtgattacagaacacgggcttttctgaagaccatgtagcttatagttaactcacagtgtggggatttaaaatttttgtgacatttatatagattatcctagagtataaatattggcaaacttgatgaaaccactggagactccatgttctcccttccccaaagtgagcattgagccacgttaggatcagaagtccaataccaggaaaggttggaagggtccatattttgcatgtgaaatgaaaccaaacatgcagacagcctgatctggaaaaagcaccaggatagaagtcaggggcaagggttctagccctcattctaatattaactggctgtgagagtccttggagggagttatttaatctttttgcatccatttttttttcctgtgaaaaataatgaggccaattaaggagtatgtctccaaatgttgccagccagctctgccatcctgggaccagcaggattcaattccaactttaatcttccttatgaaatccatgaattctaaccaagctgagcctgtgctcatcaatgcatgacagtatgtgtgatgtgtgggtgggggcatcagacaatcacttgtcgagtgagacagttctgcctcccccatcccctttccaccacgaaaggcaccatatgctggaacagaccgtgggcaaagtacagccaaacccggctggatttattagcctgttgggttatctggcagatgacagtgtccagcccaaggaatggtcaggcatagctctgtgccctactggtcccacacgtcaactcggacagaaggcaagggaaagagagggcagactcaacatctgtgatggagtgccagtcagccccattcctcttgtatagcttgcccctgtgcccagcacatggaaagagaggatagagaagtttgccaagtcattgtgtccctcaagcaagtggatgatctgctccttctctgcagagggaccaaaatgattattccccttccccgcccccactttgatccaggaatctttgagaacagatacggctttcttgtccatcccaaaattattctggttgattttaagatagatttgtgccctagtaagaaagggtccacagaacacaggggtgcttcctgcttcactaacaaagtcatctctgtctttacggttaagggcctgtggttcaaggtcaaatgcatatgtttggttgtcttcttcagtaagattctcaggtttcattcaaaactgctaggtatactgaaaaaaaagtgagcaaaagcagggcatggtcctttccttggtttgtgaaccactttaaagggaaaactgtgccctatccagagccctgtgtttggcagatgagggggagggtgcctttaaattgcctgctgcagattgcatttgggtggtacaggcccatgtcagatggaacagtgaatttggaaaaggaaactacatgtggccaagaggctgggagatgctcctgagggcagtgggggcctttgctgtaattgaaaagacaactcctgtcctgacttgtcctgcaagaagactagccaataggagggttgctgttgtcacagtctcacccattactgagcagtgacatcccaagatcatgtgtaatccaatccaaggcttgcagagagctggagtttgggtggctctcaattgcaggactgacctgtctctcacaatcatcgtaggtggacctgtggttttgtgacacaggagatcctctgtgttctagagcaagagtaccagggccatcaatggatgtgaggttgggggtaggcagagaccagcagtcttactcagcagagtgtagccaccatggactccagtgggaagccacatctcaactcttctacggagatacaggtgagatgggaaagggtcacccaacctctaaggagaacagtgagacttgagtctccagtggtttgggaagatagactacccaatcttcttattcattacaacttagcttgggggctatagacttgtctgaaggcctgcatagcctatgatgcttgttcagcattttgtactgaagtttggggaaggtctgtagcaaccaggctgcaagacactgcacagacatagatagccacagtcattgtaagagtcactttaagttgactttccagtggttcctaaaacaaacactgaaatgaagttgatggggaaaaaataccaatgtggaatcacatgcacaccctcaacaaatctgtcagaagtcaagtacagacctgtcttcacatcttgtgtcacccagaccactgctcatgatttactaggtgcgtatgcatgcacacatgtgtgtgtatgtatgtgtgcatgtgtatatgtgtgcatattaacatatgtgtgtctcaaacaacaaatcacccttcgaatcagggcatgaatgagatctaatagcaaatattttatgtattagtgaacaaaaagtggcagccctctatttaaactttgccatagtcaccagctgccctattaaaatataagtctaaagcctcaaagggcacatgcagcaattagtaatagcaagcaacagaaactcatgggctatctttggttctttaataagataatagttcattttgaatatagttaatcaatctctgtattgtgacacactttttttccaaagtaaagaaatagtaaaccttaccatccactagtaaaatataggtcctcataccttttcagaagtaccacacacattttagagtttgataataattcaatttatagcttgacacctgacaatagggacagttagttttctacaacttgaaataaagcttttatcaatttgttacttagtgggggactgtttcttagcactgctacatccacaaaagataaaaaaaaagaattgagaccattccagcttgctattgtgcagcaaagcaagtattttcttgtcaccttccaagggacaacacgggtcatctgggctcatcttactgttaaatgaagagacagattgagagaagctaagccacttatccatggttgcacagtgaggtttctttgcaatggatttagtttagctttaatgaaaacaacactctaacaagacatttcagagggtgggcaagatgactcagcaggtaaaggtcactgctttgcaagctcattgacctgagtactatccctggaaaccacgtaaaagtagaagagaacccaccctgggaagtttttctgtgattctatatgggtgctatattctgtattagcacatgcataataataataataataataataataataataataataaacttacatacaagacatgttatcagagacttaacaagtagataggactaatgacatcatcttaccaggacaagctgatgctagattagtccaggttttactcaaatgggtaaggatcatgtttcattggagaagtgggacaagcaaagcttgaaaatttgatgggcagctgtgatgaggaagggcattttacattgagggagtaaattctagcagggcatgcagagtaaagataagtgaggcatgttggctaaaagcaaagactcctttgtgaatgtcttgaagtacaggcagtcacttggactcttgagagctgggttctagaataaaggattcagcaagtccccagggcaacagcagcctgcacaagtttcttggatgtaaggcagagctccaacaaaaggagacagtgagagtaagtcggctctcaatatgatgtagtgagcatgatgtggtcccggtgacactggtgacacaatacaggaatgtaaggaactcccaggggaatgtaaggaactcccagggtaaagaaatgtttccttagaaggcttggtggtcagcagcaggtgggtggaaggacctggaaaaggaagtcatgcttaagcacacttgttgagaacacacttggttaccacacttcatagacctggtgctgctctagtcctcacagaggcagcagtgacccagccagcctccctctgtgctgctagggaggacctgggcattggggcctccacagatagggatagggcactagaagaaatagtcttgtccagaagacagtgatttggagagaacaccaggtgacccaggtaaaaatgtaggttaggcaggttgctaagaacactgtcttggtggagattggtgctgggaagggaaattaaaatttcttctgctgtgggagatgtaaatcaggtatcaaatctcccctctcccccatccccacttatgtggcctccaggctctctttctcattagggttatcccatcacctgaactctcatttctttttctcaaaccgacattcttcagttgtgccttctggttactaaatgttgcttattccaggaaacaatatttgaataattttatttttttctactagggaagataccaaactatgtgtgactgcctcaggagagctgtgaaatatttccatcctaaaatttcagaggggctgtgctgctcaagttgaataggcttgcagactgtaggaggccaggtgaaacacaacttctgagtcagtgtctcttctaatttgacttgtctgggacctactaaatcaatatgaactccacctttcttccaggactactgctgcttctgctgcctaggacctaactttgagtgttttggggcatgatattattaagtcccccaaggccttctgccactgctgagttttaaacttaggcatggcatgatgaaatataaactcagtggcaagatggacatggtatatagccaagtaaggactcaatgaagagcaaacattgcatgggatgtgacttccctgcttggtggtgtgagcaagcatcacacaaaaaggatcagaatcataggggacaaagaaagacagaaaagtgaagattgagcaatcgtattagtggccccttacttggattatcctactttaagaacgtatttgacatatttttattgcaaacccccttttattacatggtctttcgaaaataagtgtatctttgttgtttccttttgattatgtgtaagccttaggttaacatcacatctcaaggaaaaaatgtattcaagtagatgggatttcattcataaagtttgagaagtatttgaggagatacagagatcttgccaatgtcaaaatcttcatgttgcctgtctatgcttatcatagccactatgcttctcagtacaagtttacaatttactggaagtacttctcctatatgtgtgtatacatataaatacacacatatttgcccctgtgtaaatatattacatgtgtgtatatatttcagtgcttcccatttatagatagttatcttcctatatctagaattatcttggctttggggaaaaacactcatttgttaggaattgtctattatatcccaaagcgtcataactactattctgtctcagttaattttcgaatcaattttaatatttgtgcatatgtatgctagtggcattcatatgtatttaggtgggcatgtacacatgtatatgatagttcacatgcatgtgtacatgtatgcacatttatatatggaggcccagaggtcaataatgccaatatgagtgtcttctttgccattctacacctttgaaaaataatttaaattacattttccaccatgtatgtatgtatgtatgtatgtatgcatgcatgtatttgtgtgtgtgtgtgtgtgtgtgtgtgtgcatacatgtgccagtgccctcttatggaggccagaggagagctttgagagtcagctctttccttctaccatgagggtcccaagtgttgaaattagattgtcagtcctggtagcaggaaactttacccaatgagaaattttgtgggactcaaaggctctatttgagatattgttttttatttttccactcaatatagaaatcactctcttcagaaaggctggctggccagtggcttcagggatcctcctgtcacagatttccaagactaggattagaagtgtgcactaacatggcccgtttcttacctggatgctaggttctcatgcctggaagcaaggactttaatgactgagctcgccatgtcaggaacggtagaggggcaaatggatgcacagctcaggtaagggcgggtggtttctcacaggtgaagcatagggcacagaggtacccactacagacgagagggcctctgggaggactaatctgagttaaataaggaagctaagaagcatcactagggggcgttgtgcttggctttcctactgatcacagggaatatgggggcaaagagctgaggagcttgccagaaagatggggttggacagaagaaatggatcaaggacaaacatggtcacgtttggggggtgaactgagaagggttgtaagacatacagaggtagggtgagatggaggagcccagaagagtgggaaacaaggcagaagggccaagggaaatggatttgtagagaaaagtggtaaatttagttttggacattgattgaccaattcaagaagctgtgtaagagggagtcataacaggagtctggaagttgggagagcctgtgtgtgtgtgtgtgtgtgtgtgtgtgtgtgtgtgtgtgtgtgtgtgtgtgtggtgccatgccatgcatgtggaggtcaaagaatgaacaactcgtgggagtctgtttttgtcgttgttgttgtttgtttgttttcctttcatcatgtaggttctgggtattgaactagggtcattggagttggcagcaaaatgctttcaaacatgaaccatccataaaatcagtgttttactactatatcaaggactcaggactttttaccctactatcctcagcatatgagctcagctcccttcattgccaagaactgactaccattacactcgtcattacacatactcatcagaggcataaaaggaaacaggccatatcctttattactccctccctcccttcctcctttctgtcctttccttcctttcttcctgtctttctttcttcctttcttctcccctccctccctgtctcccttccttcttctctgtttcccttttccctccctttctccctccttcccttctttctttctttctttctttctttctttctttctttctttctttttctttctttctttctccctttatttctttcttccccgcccttcctctctttctttccctcttccctccctcctatcttttcttttcattctttctttcttctcccctccctccctctctccttccctcccttccttccttcctcccttccttccatcctctctctctttctttgtaatcagtgaaaagactttctcagaagcccccaggagcttttcccccttaagtgcagtattaaattgtggtgatgagttgtgggctttgaagctgtgctgtctgggtttatattctgactctacctacttccttgagcaaacatttcagtctctctaaatctcagtgccctctgctatggagtttggaagccactgagcccacattccaggataagcagcagcttatccaagagcttggggggaagttcctggaatatgcactaagtgttcagtaaatgtttttcaccactatccttgtagtatagtagttctaattgaatacatacccatgtcttaatcagtcactagtgaagagaatgactttactatgattggattgaataatcaatatttatcaatgaattaatgcacagagaggatgatctgaggactagagagatggctgtgtagttaaaagcacttgccattctagcagtgtaccatggtttggtctccagcatccacataatgctttacaaacacccctaactccagttttaaggggtctgaagcccttttctgaactccaggaacaacagacatgtacatagtacatgtgtattcttgcaggaaaaacactcttacacataaaatacatctttaaaaagaaggttttatatataactatgtatatatgaataaaactttggcgctgctaatgaggaaagaagaatgtagccatggccttggaagatgtcactatgtagaaactgattttgacttcactgagtttattatcagctttcagagtgatactgggagaagaaatgatacatagaatattaggcttgctgtactattgacacattgatgatatgcgtatattcagacaattcatacttggatcctattaagcaaaccacgaaagcacatttaaaacacctaaccatcaattccagtgttctctcagacatcactttacaacatcttctctttctacatcaatttgcaaagcttttcctgcctaccttttctctcggagctcttcccacaggtgatgtatgaaggagaggtgctattaccatgctcaaggggatgaaattgaggcttttagaaatctcattagaatcttggataaggaaggaagaggttgcagaattcaggctcaaaaatcaagccacccatttcttagtaagatgttacttatatcatagtgccttccctacaaaataatatccatcaccagacacagtcccctacactcctacagccaagattagctatagtgtaccaactgtataccagtatcaccagtgtgacacttttagccaaggtcattcatggagaagtgatcatgtccatgcctttacatgtccaccttctagggctacttagagtgttggcaatacgatcgtccatcaagtatccagtgttaactgtaatatttaatcatttattcatctatggacaaggtttaactacatagcacaggctggtctccaactcacattcctgcgcattcctgtgtccaagtctaacccccacttacacactgcagtggactttgaagcaatgtgattggagagagactccagagaaccatgaggaattgccagtgacttacatttcttcctcaacctctttctttatgtttgtattgaactgaatagctggtagccttttaaaaactccaattagcatttcataggaagtctttggcacattccgcaaggttgctataatcatcactgtttacatcaaggcacactctgtgtttctgcaaaaggcccagctggggccctggccttgtggacatctgctttaaatgtctctacaacagccccctccctcaccatccaaggtccaaggctagtgacagccctgcctctctaagtattttggagctcatatgtttatgcttttcttttcctctgtattccaggactgtgttgtgatactcagggtcttcttcaaatacaacaagcaaaacccctaatataaatatcaaagctcaggctggaggataactcacttggtaaagtgttggcctcacaagcatgtagatcagagtttgatccccagaacccacatacaaatgccaggcatgcctgtgatcccagtgatgggaaggtggagatgagaaaatccctggggctctttatctttagccagtgcccagctgatgagctccaggctagtgaaagaccctgtttcaaaggtgatggacaatattcctgtggatgacacaccaagttgttccctggcctccaatggatgcacatgtacatcctcgcacatgtatgccattccaacctccgaatatcaccacaaccactaaagcaaaagtcactgcaaacgtgtaatataaataatgctatggaggcctggtaagttcacgagtagaatcatagtgagatttctgtttgtattttcaatttcgagtggaataaaaggaacattgctctatctctacctaagacaatgtatctctaaatgtgaggtcccagcatcttacttccctcccatccactttcaagggcatattttctcaagaatatcccatcggtagcaggcagtctgctgtcaactcctagtatcaaatagcaagttctccttttctctctctgatctacttacctatcatgtatacgtgcgtgtagccgaatgaagaaaatttatgcacaccaccggccagaagagggtatgtgatcccctggaacttagttccaggtagttgtaaactaccccaccagtactgcaagagcagtacatagttctaaccactgaactatcctagcccttgttgttttgagatggtctgaagtctaagtagccctggccacctaggaactcaagaactccaggctccagcctctgagtattagttattatgggcatgtactgctatgcccagaatgttccaatgtcttcccatttgaaagttaccttatctgaactcaggtgaaccacagtgaagtataagtataaataaaagatatcattaagagtttactgtgaagctgggccatggtgctgtgtcccgaccttcaggacatccacttggggcaagagagtcagggatagggaatgggaacaagagacgcagaaagaacgaccacaagacaggattctgatcaagtggcaaactttatttttctcaggctagcgtatatagcagtagatcagggtatgaggtggggtagaatgggttgtttgtgcaccaggcgttagtgtaggcaggatattaggaagacacagagaggatgtttggcagggtaaagcgtttatgagtaagaggtccaggaagggttgcctcggtgactgagcctgtgggtggaggactgggtcaagttgtttcttttctcgagctgaggttctaaggagctgctatgtaaaggttaactatggccaagccctgaaatctttggctcccaacagtggcgcacaaccttaatcccagccctagggaggcagaggcaggtaggtctctgtgagcttgagaccagcagcctggtctgcaaatggggttccaggacaggctccaaagtgacacagagaaaccctgtctcagaaaaaccaagaaaaaaaaaagaaagaaagagtttactatgtgtagcttggtggtagaacagtcacttgcctatcacaagtgagatcctgacttctatctagttgtgagactttttcctagggagacagcagcaaatgtcaattcacctcagatagggtactgatgacagaccgaaaaaacaatttcccatacatccctcttagtgaactagtgactatgtagaagagtatgagtgactacagtgtggttgtatcacccaaaatctcaccccagcacgggtaatactcaggaaagctgcatctctggaggtccctgcattactcacaggcagctggctggacaggctcctctgcccagagtgcctggtaattgacatgactaataaaaccatggggaaggagccttgtgaatcttctaagtttctgggacttcctaaacctcggaagttttgtttactttctgagccttttgtttgttcactttctaagtcttatcagcttcatgagccaccttcttccctctaggacagtcattctcaaccttcctaatgctgtgacccttttatatagttcctcatgctgtggtgaccccccagccgtaaaattatttcattgctactttataactataactttgctagtgctatgaatcataatgtaaatatttttggagatagaggtttgccaaaggggtttcgacccacagttgagaactactgctctaggaggaagggaaaaaagtttacttgtcctgaattttccttctattccttttcccaagtgaatcataaccttgactaagggttgacaatgatctgagaaccaaatctaataatttcgtggatattttctatggctctttgtgtcaccctagtggatttgaatagtgtcatcaagaaaccatggggcttgcaaacatgaaagtgttttgtattctttacagagaagtttgctaaaccctgtgttcatcagctctctccaaaatactttacctgtgcctagggcttcacagttcacattcttcttacgttatctcctaacacactgaacaaccaattctcctcatttcacagatgtgactttttgaaagtcactacctcaagaccacagtggtagtgacaaggttgggactggttcaatttgatgtttacaccctggagatgacactctttgtgggaggttgtggccaaccttcagctggaagtaaagagctctctgtatgcttcaagctcaggtggttcagggggactgtttcttctggctactttttccttcactcttgaattcttaaattggctagctcacttctctccctataccagtgtggaggcaggagatgcaaatatggaggtgaatagctgtaggttggtttaatgccattctcatcaggggtaagattagaaggcatgagggcactccaagagttcaaaggccagccactgatgtgtgggcacctcaaagccacgctgctgctttgatatagatttgtccctggttgaaatggtcactgtggtcattgaattcaatgctcttttcactgcatcaatcaggctggtacatgatcataacacaaaataatagtcatgatttcagtgagaaaagacaactgaggacaagaaaatcatgctgattttcatattaccaccagttcagcccctctgtgggtatatactgctcctcatatcaagtgggtgcggtgtctaatttcttctcactctaacctggctgatgtgtggcatgtttgatggctaagcaccctctgggacttctgatgaactctgggaagctggcagctcacacttgggtctctgggaaggcttaccctgagacattctgtctcagaaccaacctgccacattatggagcacaaaagtcgctgagaggccatgggcagcacctttgtcaacagtccctgataaattttcaaagcaacagacagcatccatatgcagttgcatgagggcctcatattacctggcagttactgtactgctgtttcaagccacaacatttggacacagattgcagcatctacagatggtaagtggattaaagttaaagaactaaagggcaatttagtcatgaagaatgaagatatgttatgaactccatgcaaccagtcaaggaattcatcacccggtcacaaccagcaaacagaccagccccacccccagcttgcatgagtaagcaagatttaaggtgccacttatctccttttagggagggtgtagaccgaaggggggatgtcgactatagtaaagactgctgagaatatttttttttaaactaatgcctcaaaattgggtctatagtaagaaaatttttcctcatgttgctgcttcaggcttaagaattcttactcttggagaaaactgaaaactgaagagaatagtcactcgaaatgattcttcaagttagaaccaggaatgaaggtctccaaaactttggtttgaggaaaggaagggaaagagaaaaaaggtgtcacgtcctccaggggatatcaacttccatctgaggttggttcttgtggcctgaaggctgccagtgggaagaaagaagaaatagtttgctgtgtccactggccttcaggcattctctaaccagcaagtgcaatcggacgaccgtgcattgctcaggcactcactgtgtgcttttttggattcttcagtgtcatgattccaatgggctaatttccctcataggaacaaagaggccatagtctgtataggagggtatctgtaagtctccattcagacttgaagagcacaaatgttaccactttatgcttgagtttttagaggaggtgtgtgtgtgtgtgtgtgtgtgtgtgtgtgtgtgtgtgtgtgtgtgtgtgtgtgtgtctgtctgcctgcctgcctgcctgtctgtctgtctgtctgtctgtctgtctgtctgtgtagtaacagggtccattttgtggaacacaagtagaatggtaattttgtcttaaatttcattcatcatcacccactcccactgcaagcatggtgctctgtttcctccccactcctccttggtgcaaggcatgtgttctgcccactcagatctgcgtgacactcagttctacctggatctggactggaaagaaaactaatgtatacagatttcacaagcggacccccttgcatattcatatcttcctagttcagcagtgtccagccctgagagtgactgagaggaaggtaaaaaccaaatcagggtctcattctcctggatgtttccctgctgggtcacctggggacagtggtacacttggctcaaagcccagcccctgttgtggtaactctctctgcacttctctcagttttggttccagtagcagcccccacccccaactcctctcttgggtttgggactggtaacagctgtgcttttattacccaggttgctgcactaaccctcgtggcttctccgcaactctgtaaatagtccctttattaaattctcctggaaggatcctaatttgagcgtgccagctatttcctgctgggaacctaaccaacacactattctatatgaatggccattcacatcttaatgtaaattcagttcaaagttttccttttccttgactatttgcaatttcagctccaactacaacaataaaatgatttgtatcctcataaatttcatagataaacatccgggtgggagtctcatccaggaaaggtcaagattaaaacctggcccttgtgactcacacccagagggtcgtgcactgattctaacaagactttctataataccataaaaattacctgtatgaagacattagttatgcaattaatagttaagttagagttggggggcagttccctggccccagtccatgggactatgacagaagatgaatacatggatacctaggagaagggattctgggggagggagaacacaccagagacgaatacttcccactctgtgacagctaagaccaaccaaccatgacagtgtacactgcttctagaagtggaaaaacaggttagaaatgccatttctgccttctctggagtgatgcctttagaaccactggtttctaattaaaaaaaaaaaaactttggacgacattggcagtgttcttgaaggtcttctaaatgattcctaaatttttaactattcagcagtaagtcggaagtcaaaggaagcacactgtgtgtctgtgttagtaaggaagcagaagtcaacccttcaggtatcattcagagtgtctagtctggctcagagtcctccacccactcgttcccattatcagcccattttcctttctttcacgtatttcctggcagatgtagctgtagttgactcggtctacttcttgacttccaaacacacgcaccatttctcacctcacagcctcttgcttaacttttctgttatcaaaaatcccttcctctacctgcccagacttcccagtgggtggtgagatcccggaagaagagagtctggagttcttctctttgagtaagcttcctgcctagtccagtaccttgcacattataaccatgccccctccctgagaaattgtaaagtaaattagagcatcggatgcaaatggcaagctttcagaaactgtttctaattttctttgcctgagtaaagcaggcgaagttaaggctaggaaataagagaggaagaccgcaaggattccatccttaactcttccttctcaaagcagcttttgcagatctgcccatctattcttctctgtctttctagtagtctgatgctccagagagactcctccagcaaggagttaaggccagatgtggcccagtgcccagataagtcctatgggaggccagaggaaagcaatggctgaagcactatggaaaatgtgacatccaactttcagttattccctaaagatggggccctgatctaacgtttaccatgcaccttttaataggatctaaggagtcattaaaagcttttggtgtcactgttttaattaagagtaaaagttctgtgtggagcacacgtgctgaggctttctcagcagtggccatgggggagaagtggaatgcgagatagttcagggctccatgctacttaccagggggcccagtgaccacgcatggtttaaagcaggttttgaaaggaaacctcatccagcaaggaacacgaagctgccatgatgaaatggaacattagctctttcctctatctctgcctatgccgttgaaactcagggttacgtagtaaaactatctgagttaacattttttttaaactatcatcacaaagtacacagaaattgaatgcttaagctaacctgcaaacttagagtgacttgtgacagcatctgccacatttgggatcttccttcttaagcttcatccttggacaccttgcttccacgatttctgtaattttgcaatcagtgaggtaataaatgtgcatttgattatttcttctttcagggctgcacagcacatcactgttcagcaaagccaggaagcactttggatgcctgttttcttcatctttcctgttacctttcttgataaacaaagaaactatcttttcaaaaccctaatttattggaagacatagttgctgagtgagcagattccttaacctgactaccttcttccagctttggagggaatccaagactatttctttaagtacagtgcaatcttacaacaataaaatactgtatttgaaacatttcccaataactgcctacattagggtgttacggagctagccattactattctacccagggtacattatatcataggcaaacactaaacttttaaaggtttcctcctttggggactgggcaatcactacacatggattaatgtgttatatagcctgtgctctgcaaaaaatggcatcttgccttttctggatagccacatctgtagaaacatgcacccgtgagtgtgagcatgtgatgagttcacaggtatggacagaacacagcagcatgctaagtataactaaacagcaaaacccaaacccccaatccaaaaacctaaaccaaagtcatttacctgtgactttgcacggtctaacggttccacatgcaggaaatccctccagagatgccgacactagtgtgttaaggtctttgattactttcatatggtacacttggacttgttaacacacagctgccacacatcagaaggtactgggaaaaatctttggacaatacagcaaaaaaggcagtagatgaatttcagaagtaccccctgctggaaactaggagaggatatatatatatatatatatatatatatatatatatatatatattaaaggcaaagtagcagagattctaaatgtgccaaatgcatcaggaaatatccctccaaagttgctggccttttgtgttctgaaatgtccttttaatattaaagtcactctgctgtattcctaatggggaaaaaaatagaaacccttcaggattgattaatacagttttttctcccctcgagataattttgtttgttaagagcaaacctgacagtttgggaagactaattatgatccaagagcaacccaggccctcggagcagttctcaagaggtgagtcagtttatatgccagctctcaagcgttgtgacacctcaggggatgcaggtacctatgctattcttaaaactttccagtggagatgattcagcagtgtgtctttagaagctcactctgtgtcaaactgaccatctaaaagaagatgggaaaacatcagccagggtccctgtggggatggcagaaagaaatacacaagagatacttgaattctgtctaaaatagtttcttgttacagaccatttcttgaacaggcaccattatggagatcagagtttccatacaatatacagatggtttcaatgttgctagtataaggtaatggttatttctattcatcaagaggctgcaggttcccatttgtgatatgcttgctggcttcagagccctggattagaaaagggcaggcagtttagggcagtctggacagctgaaatttcagcaaaatgaatgttaaattattgacctgtgaaggaagtcattgtacttgtatcctggagacacgggttttaaatggcatgtcaacacatgtaaacaaatcaagattacatattctgaggcagaagttgtctcaggttccatttaccagtaaaaggaagaggaacaaagatgtagaggtgatttccttttttttttatgttgacctatggcaaagaattttctcaattgcagagaaattggcaatcactttacaattgattcagcatttctcaaggggcattcattttccatgtgtccaatggtaataggcagggaccacagccatgaataagactgataaaggccctgctttctttgctgtttacatattgttggttgcccctaagttgtggaagagtggctgaaaagaattccaacagggcaatctgagctaatgataagtgccattaaatgcatgcaactacagaatttgaaggtgtctgtggataacacaatgagctcaaaatctgagggtcagcaaaagactctgaggaaggaacattgaagttgagatctgagtgacaagaaggaaggagccaggcatttttgtaaagctttgggggagaacagtccccaagcaacagaaaagcaagcacaaagaccctaagtgacaagtgagagcaacttggtacagttaattcagacaccaaacatggccagtcaggcctgaatataatgggagtggcatactgagcttttattgaagcagtctgcatgattttagattgtactctgtaagctcaaaaaaattaagcacttttaagatattacacaccatgtctgattgtggatatgattctagcctttacctattgtcctgtcagagaaaacatctgtttcttcagaagtaacatgatatcatcgcttgtgtttgctggttcttgccatggcacacaaattctggatctcaattctctgcagagtgtccctccctcccacatctctggaggccccaagggtagctcacatatgttcacaaataaatgcatccttatgtgtctgtattatcattcttcagtccaagatgtctgatgagaagcaccccatcttctgatcccactgaatccccattacttcggacagtgaccacctgtgctggcaacagcctctaggaacagcatcagcaccttctttgaagggcatggaagacctcctgtctctctaggagttcccgaggtgttcaaattgcaaggaactgcaaaatggccaggaatgagctttctatggttgctctcctgtagaaggactcagtagccaggctatttttgacaattattttccagttcagtgacagtcctggcaggtcccagtgacaatgccaccctgcccttgcctcacatctgtgacacaaacatggatgtgcagaactccacccaggaggaaacagcaggaggagcagcacgctgctctctgattcatcttctattctcgacacttgcaggacttgctattccgtttctcctctcctgtctacaggtctctgtcttgtgacccattcaaacatagacttgataaggatcacacttgctagctcccctatatacccaggcatggatgatctccatactagacatcatcagctatcccatgtaccagtgtctacttggtctgcatcaattctgtgaaagcccatacctcctccaggttcatctgccaccatcactgctgcagacataaggagccaaggtctgagtgaggctgcccttcctttatgtccctgagccattatggcagtggaccttttagtcttcccatgatatgacctttactaactgtgggatctttaggcctgtgctgatcacttaaggcaaggacatgacactgtggctctgtaagttcttctctgagccttttgcccttttatgactgtttggagttgtctggagttgcaaagcaacactgcacatacattgtctcattagatacaaaggctaatgcctcaggctactccttcagtctcatattttctgtgctgaagttcaaaccatacctctgcctccgacgtccatgagtgcaccctccgtgtttgattcctgactggtactgggacacattccacaagctcccacttttggagcactttagggcagggtaggttactcaatggagtggtgacttttgtgcaattctcagatgggttaaaggactggggctctgcttcttgcttggaagaggctatcagcctgaaagagatgtttccctctgacttggccatggctgagcaatagcactgtgtgctaccctgacatatgttgacaagagttcttcattttcttctcctcactgttttttggggggctagccaaggaactctattgtctctgtcttcccaatagcctcaacatctcacagggagaagacatagtgtgcccacatgtgcttccagctcatatcttatatgaaacttaacattagaggagccagagtgactttaaatgtaccctagacaagattcattattttacagcaaaagagattttaatggtggtacctcaattctgaaagtgggcaaaatggtgagtatttgtacatcctcccgaggctcctgcagctatgaagtggctttccatctcccttggggaagaatgaccagcataggtcgtgggtattggtctggacttctgggatatcagtccatcagaagttaggcagctgaggtgacactctgctctttggctttattcaagcaatatgaatctttcagtacagtagaaaaaaagaagccttttttgtaatgaaaacttctcaggcagttcttccaatttctccaagtttctcagagcccttaggtggtatctatcagctgttaattcagaaatgtcaggctcatttgcaggaatcatttttgtgttcattcttctgatacaggttctcgtgtttgatgttgaaaccctgtgtgatgtctatttctgcctctcctaccaggtattgatgtacctgctgactgccttactggtgagactgtagcctctgatggggccagctgctgtctcggcagtcaagcaccctcacagaccctgtgccaagagtgtccaagtctccatgagatgccacaactgtccagaatcccactgtgcaatgatggacctacttttctttacttaggtcttttatgatgctctgtggtcccagagcaatagtacatgggctgtacactcctaaaatggccttcctaaacagtgatactcattgttacttatggacacaaactctcctcaggactgaggcattggctgggtaactaggttaggggctaacccaagtgacagatgccctgaggaaatagtaatcatcttcatggctctgttcctgatctagcttgtgtttggttctctttcctattaggatgatatctaccccagaagctgctcagcaccacacaaattgacctgtgacagtcctaccttgccactttgccaaatacccattccccagcacatacatatattcccaagagtggttacatcatactttccccctacatgctatcaccctgaccagttattttatgaaagtatttgaaacattctaccgacattttggcaatgtcttaagtgataaaatacattaatgagaatttcaatcagtaattctcttccatacttcatagtgcagtaatgtttcaaaaggttgtaattaggattaatttgtttggtggttaatgaggtcatcatgaatcaaaaatgtagagtagaagttagtgtgcttgctcatttgtattcaagaatatgtgttgctgatgagatggtcaaacagcggaattcaaatggaattcataattgttcctaaaagcttacatttggtcattaagtgaatggtctagaattcttggtttggcattttgggggtcttccctttttctcctgaaatcacattcagagatgctctagaaagacatcagaatgccctttcaactgaagaagtgagacatggatgttcacagtgtttgtgctgttgatgagcaaatgcaatgagcagaatgacaaataaataactttgagacactacattgcttcccagcttctttttcaaaagtttcctttacctagccctaaaacagttgcatatttgagcaaatttaaagtttgactttaaatttgtgtaaaattgttccagaggtatgttggtaggtatttaaccactgacatacacttgtagaccttagaagggcatgggccatatcctctgcaggaatgtgcctataaccctggaaaacaaatctgtacctatcacttgtgggttgcattaggatgatccattatagcaaaatttaactcattagaattatttttaaaatccttcctcattaaactcttatttttattttttctttaagaaagtactttttttttttttcaaagttgatttcaggtgggctcaaaatacttctcagttgatatattaatttgtaaacctttctactgcaataaaagtgacttagaggtagatattacatacttcccatgtaacataaaaaggcaaacaagagaaatttcaaatgaaagtcaaagaacaagcctcggtaggggaaaaactgccctggcagcattctctagattagggaccagtcccctaggcacgggggcccacctggaatcttctagcatatatgacaggatggtaggaggaggaactctgagcaaatagatgtgtaagtgctctgggctttggcaatcatgcctccacttttaggaatttgaagtgcagttggggatgggagctgaagctcagacaagcccagaggcaggtcctgagctgtgtgggttctaaagaaaaaccatgagtactcagagggtcagaaaacatgcaaaacaaagaaactgccaggctgaaagagtaaacggtgagtagctggccatcaactgacgtgtgtgcatccttctcagctggtgagcttccagcttctgactgtgtggaatccctgaagtaatcccagataagtgttatgagtggggcataggcacacagtatgaactccatcacaggcactctcataagggcacacaagagaaactgagtttcctctaagcattcttcatgatgtgtgttgtgaagatcccttgatgtatgtgcagaacagaaagatggggagtttcaactttatatgtggagaaggaaacatggctgggtagccattcttagactcagccttaactctaacagctttgcattactgaataatgaaaaaaggcactttactgggagtaagtgtttgtggttcaggtaagtaatttttcaagaatttaacttgacatgaaagttagggaatctttgaatagcttccaagtatcagttattgaaggtggctttgtgacacaattttaagccagatgtctcgttcagacatctgtggccatagccatcataccatacatttgttgctgattctcttaaaaacacagcagaaaacatgacttagtgattaggaacacacacatactgttccttctgaggctgctattcagaggacccaagtttgattcccagcacctacataggtggcttacaactgcctggaactgcagctctggaggatctgatgccctctggtggtctctgaaggcacccttacatatccatacacatatgcaaacacataattatacgtaaatcaattttttaaaaaaatctaagaatgcactgtctttaaagaaaaattcccaaaccaacatttctataaatcccagtcatatgcagagtacttttgtttactgttttttattagaacttctagccttgatacacaagcagacattataacattttccaaataagaaagtgatactaaatgaccaactgtttattacacagatagagaagaagaaggctggacataaacctcaataataatgaggataatgaggatgctggctcagacttataaggctgtaaccatgaactaaatattgtaataaacatgtaattatccccattgcatagatgagaaaaaccaagacctcaatgagcccaaactgcaaccacataaagtaagtcttaacaagctggttaatatatttataggtgatttcgggatctgtcagtgagttagcagttgatgcttggggcagagttggagcactgaagaagctatctaaagaggagctggccagatgctcagggtgagttggtaaagacaggaagccataacatcagtcacaggcatgccaatgaagaccagatcagagtgggagtgaggcaccagagggaatactctagaatgtgatttattttagctgctaaggagatgcaggatggaacccaggaatgaaatattcagcacctggaatttgggatgttctgtggaggatgcctgtgctcaaagatgggtgggtgtaagctggttttctaaattgcataggctgtccccttaaggtcatcaagaaataaccatgggcaaggcggtggtggcacacaccattaatctcagcacttgggaggcagaggcagcagatctctgtgagttcaagggcagccttgagttctaggacaaccagagatgtttcacagagaaaccctgtcttgaaaaacaaacaaaaaatgcttactgatctcgcagaggacacatttttggtttccagcacccacagttccagaggatccaatgccctcgtctagcctctgtggcaactgcactaatgtggtgcatatacacactaatacacataaagcaaaaataaataggttttaaaaaactgagtctgagcctggtggtatggcacaagcctttaattccagcacccaggaggcaaaggaaggtgggtttctgtgagttcaaggccaacctggtctgaaaagtgagttctaggacacccagggctacacagagaaatgctgccttgaaaaacaaaacaaaagagtctgactccaggacaacaggaaggacttaattatgaagtagactgggagatatttgggctaatattcaccttccaccagatttttcatttacctgcagcatatactgtcatgtcttccttacactataagattttagcctcaagctctcagtgatgatgtagggcagaaaagtcctttgcatagtatgtagtggctgctggaattactagcagcatctgttttgagacacctgaattgtcgtcattctttaaatagaaagaataacaataagattactttctaaggcactagggtcaaccaagcatttattgtaattgaagacatcctggggcttcacaaatgcagagattagaatcacttctctggtgtctgtttgctctacttacatcttttccgccctcaccactgaggtctttttattttaattttattttttaatcttttttcagatttttaaaaatttaaattagaaacaagcttggtttacatgtcaatcctggttccctctccccccctcccctgaccctccccaaccctctatcccatcccctttctgctccccagggagggtgaggtcttccagggggatcttcaaagtctttcatatcatttggagcagggcctagaggccccccccccatccccatgtgtctatgctgagagagtatccctctatgggtaatgggctcccaaagtccattcatatactagggataaatactgatccactgacagaggccctatagattgcccaggcctcctaactgacacccaggatcagggggtctggtttggtcctatgctggtttcccagctatcagtcccaggtccatgagttcccccttgttcaggtcagtagtttctgttggtttctccagcctggtcttgacccctttgctcattacttctccctctctgaaactgcattccagaagtttggctcagtgtttagctgtggatctctgcttctgcttccatcagctactggatgaaggctctaggatggcatataaggtagtcatcaatctcatcatcggggaaggtcatttaaggtagcctctccactattgcttagaatgttagttggtgtcatccttgcagatctctggacatttccctagtgccaaatttctctttaaacctacaatggctccctctattatggtatctcttttcttcctctcctctattcttcctctgactcaaccttcctattgcctcatgtccttctctcccttcctcttctccccttctctttcttttaaattcttctcccttccccccttgctcccaatttgctcaggagatcttttccatttccctttctctgggggaccatgtatgtctctcttagggccctccctgtttcctagcttctctggaggtgtggattgtaggctggtaatcctttgctctatgtctaaaatccatatatgagtgagtacataccatgtttgtctttttgtgactgggttaccttactcaggatggtttcttctagttccatccatttgcctgtgaatttcaagattccattgtttttttttttctgctgagtagtactccattgtgtaaatgtaccacattttctctatccattcttcagttgaggggcatctaggttgcttccaggtcctggctattacaaataatgctgctatgaacatagttgtccctgtggtatgaatgtgcatctttgggtatatacctaagagtggaattgctggatcctatagtagactgattcccattttcctgaggaatctccatactgatttccaaagtggctgtatgagttggcactcccaccagctgtggaggagcattcccctttctccacaacctctccagcataaactgtcattggtgttttttattttagctatttcgacaggagtaagatggtcactgaggtcttttagctcattagaccagagtgataatttgcctggaataccatgacgtcattacacatgaagttccaccaggaatcccgccttcaccttcttctccctgtctctgactcctctcttgctctccagagcttccttccatggaagggtgcctatatccccagccccatccagatctcttgcttgacttccatgctcactttcccaccagtcaatttttctgtactcactccagacagacctgcatgcagacctcagatccctaaattcatgcaggataaaataggtcatcatccttctacccctcttctcaaaccagataatcagatgtccgggtttgtgccattacagttccatttgcttaggccggaaatcttgggtgtttttctctttagtcacccttcttcctgcctggtatgacaatttagtgtaactggacgtatatgccacccagcttgcccacttcagactaatgcactctctaaaaggcacacaaaatgagccttctgagatgctgatctgatgatgccattccaccagtgtagcaacctcctaatggtttcctacactcccaggaaaggaggataattccatggagtgactcatgagaggtccttgttcatttgtgcctaccatttcctctctcctagcctaacttcctgtcatcccactatacctgcatttattcccatgtgtgctgctctttcctcatctatgcaagtcagctttcacagtaccctttactaacgctcacacttaatcacctttaacttcctgttgtttcttttttccagcatagacgttgcctcatttcagaagccttctttgccgtggagcctgggttagtcgttcctcctgtgagggggtcctgtggagacaaaatctttttttcctccttgtttgggctcttgtttatgctcaactgttatagtgtttggtgtactgtatggcacagggttgatgctcacactgtttacattgtgcacaccctgtatccaaaatacctaccaaatccaccaaataataacgacatcagtataaattcagtgagtaaatgaagccttattttagagttcccaaatgcattctattaatatgatggcagttgagaactgttacatattttcttgtaatctttggtcccagaggcattttaaaggaaatttgagtcattcttttcaaacttgcctccatttactttccagcatgattttggcacctgtctcattctctttccataccatctttaggggttatcacatttccagcagcctcagctataccatctgaccatgtcagagccatcacagtgatatagaattgatacatgtttaggacctgtgctaacatggtaattacctgtggatcctcaaaactttctaacgtggatgatacaggtcacctgtcatgtcacttggccacacaatcataaacctcagtgatgtgtttgccatatagccagctgctttgtgttctttacatttaactgtccatcaactgtggatgatttccccaaaggaggactcatgttcttttcctatcatgttcctctattgctgaaagatcctggagaaaatgggctgagttggtcagccagttcaggttttgtgtaatattagtggaaccctagaaaactcaagtgcaattaagaaaccctgtcatttattcattttgtatattctcagcctcctccagctgtctcaaaaggtctctcccctttaagactgtagtagaggacttttctcagtccattagaggggctttttctacaataacaatgggaccactgagctctatcttcactgaaccacttactcttctgaaaccacagtgttggaagaagagcagccagaggagagcttccatggaataggcagaagctgatcatggaaaagaataggacctggggggaaaccacagaggtgaagaaaatatagaaagaatttgatttagaaaaagtttagctcaaaaagtaaatatcaaatgccctactttctctaaggaaaattaataaaatgctgtgtgttttctctcacgtctagaacttacattttataaatgtgtgtgtgcatttgtgtatgtgggtcagtcatgaaactggaatggagaccatgagggggaaagtagagatgttaaagggagaagaggggaagagaaagcaatacagacacccaacctccaggcccatcccggctgtacatcctgtgctgtggcccaggctcactagcgtggctctcacccctcatcaaagcggcatcttgttacaaaagacagacactatcacagaagtctacaactgctcgaaatgcggagaagaggcaaccatgtgatgcccacgatgcatctgctgtacaacctctacatgtaagacccagggcagattttggaagaggcaggaaagattttaagagccaaaagactcagacgtttgctataggatactgtcttctgtatttgacaggcaagctatacctgtgaactctcagcagtgtggttgtctgaacaaggccagcataatgacaacagcagttgacatgacaaatgaggacaggggaaattcttcatggtctcatctcctgatgaagacctggtgtcaggggtgtcaactgctgacagaaggacaactggtgtccttcagggatgagctatcacatagattgtctaatctcaagtggtcagttctggacacatgtgtacacaggcaaagctaaaaagatctcagtaggctatagatacaggtctgaatacacacacatatacacacataacagtaatgattaaagaagataacgtggattttggaggggtatttgggaggagttggaggagaagagaaacgggcaggagtgaggtagatacagtgatcgtgtatgaacaagttaaaatgattgaattaaagaaagaaaaggaaaaagagcaagagaatacgtgtaacatgagagcagaagggagggggctacaggcagaggcaggggtcctgagggagggaccagcctgatggggagggcaacacataggaacaaaatatggggattggagagacgtcagcatttaggagcacttgctactttttgcagaggacctggcttcaattcctagcacccacttggtggctcacaactgcatgtaactccagttctaggagatctgatgccctcttctgaactcctctggcctcaagcatgtacatggtgcacataaatatatacaagcaagacatatacataaaaaaatcttaaaccggagcaaagtatgtataaaaatgcccaaggaaacctgttactgtgttagctagttaggcgggactaactatcgtgataagtttaaaagttaaagatgaagctaggtaaactgaaaaggaaatttgtgtaattaaaaaaatccatgcagtgcacattggggaactggtgacttttggcctcaaatttcctatcacctgaagtaaacagatctcttaacctgaaggaaaatactaatggcccaaagtaaccagcctttcttagtgtcacagcagctctcaatggtgtgggggtagggtggtatagaggactctgagcaatgtgttcaggcatgttggtattatgtctttgataaaatgacacaggacctcccatggcacttagtggctggggactgacactgtacaggactgacctctatttgagaaccattccaatcggaatgctgacagtgacctcttcactctgtactacagaagtcttagaggcaaggaccattaattacactttttttgaggtaccttggcagaggcacttaggaccagcggagcatataggagttgctcaacgagagccgggaaataaattctgcacctacaaagttgtataagatgcatttttgtaagtctgtggatggttttctgtcaacatgcattttaatttcagagatgcttaatcttcacttctgattgacttttaattggcagtgactcctaacactgagcgagctcagttattaaaatggaaccctgcagggaatccatttgtaaagcgataaatccttttacagtgtgaataatcacccattaattgatctggtttgtaaatttgaattttcatatgctgcattttttttcttggacatgagtaccattttgatctcttcatgatgatcttaagagttcaagagggtctaacacatatgaaggattagaccaaattttataagagttttacataactatcaagttttctgctttaggatgttttaagccaatctggttgaataatcatttgttgcttgcaacactactggtctgttcacttggttttgaaataaaatagcaaaactatttgtctctagggaatctctgggtagctaacagtgttttaaaccatatttattcctaaagagttttccttctatatccttctttttaccacacagtgtcccccactcgattctgtcaagctaatgcctgtggctaggatgccaacagaatctagatcacctcacccctcattaaagacctgcctctcgactcaatatttctttagttttacaggaccgaattctgaatgctccctgtgactggcatgaagccattatgagaaacggtcacttgagtgagcctctctggagagtgttacaggtgtctgtctgtatggctgattctaacaaattccatccccagcctattttctggaaatgaactccgtcacattaggctttccattggtaaactcatgcttgataatattccatcctgctgctttgggtattatagcagttcatgcagaaagtactggattagcctcatcacagatgatgatgggggatatagatgtgcgtggaatattattaccaataattacagagggaacatttagcctggtgttcaatccacgatgcccatagtgtgggttataatatgaagactctcaaatgttctaaaggtacctgctttggaagcaatattaccacagggggcctggtagccttaattaatgtgtagcatagccataggagggatttttatttaaggttgctatagtacccccccacacacacacacatgcctgcttccatttcagcttttttttttctgccttgttcagattgacacaggcatcactctccgtaatatattttccttctattattctgtccttcgacttattaatccatcattttatttggccccatttttttcaaatgttagatgtgagctgtgatatttgtcttggctagcaaaatgcatggggtatgaagattcactccaaatacacctttcccgagttcttttgtgtttccgggagaaacctgcaagtcttacttccttgtgattgtatgcccctcagactagacccctccccccacaagcccctgtttgccttttatctgtagataacatttgggtcccaagagtggttaatgatttccctatccacatgggtggtggaagccagtaaagggaacatggggtcttgtcagaaaaagtgtccactgtgctgtctcagcatagcgcctctccacccaaaagagagtgggggacaagccagaaagagacaataacattaaaagcaatatttctgtcacaaggccttctcagagctgtgaaactaacctgcttgtatttttttccacagcccataaaagggctcacagccagaaaatacaaatcccataggctgctattatgctgatgacagtgaagaaagagggaaaattgtttcattgctgaattgcagatataattatgacattttatatattttgcagggtgtacaaagagtagtattaatatctactatgccctgtagcgggagagaatttagcacctcgagcaggggactctgagtctgattttgctgggattgaatccccctggctgtttactaataggaatttggtggttaaaggagaaattcagaagcaggtgataatggctgcatcttttgcaggaccagctgattcatacaaatcatttgtaccagctcagggagtgaagctaattgcacttgcacagtgtgtctttcattgccaagatttgcagcaaaagtctcactgtctcctttagccaaatatggatacaatgaggcgttgacagacatttaaatacatggttcgtgggagaaatgtttgggagttgatttgggggtcttgcaaacccactcagagatgacaaaggtgaaactccctttactccctttactcacaggtatttgtgggtcgaagaaggattgggaaaaggtgtgtgcgtgtcacaggggagggacatacttatatcattattcaatgtagttcaagcctcaggactggggttggtgatccagtccacacctgatattaagaattaagtattcctgctcaacagtgagccaataaataaacaaacaacattttgggagatgcagaatagacagagaaataaaatgtatagtaatgaaatattcataaccctgcattttatggacctcaaactctagttcggtgatttacactatttctgtatgcagtggtatgggatctgccgaacactaataaagatggcattagaatactattgcctcagtatcatggtaaagggaggattcatcagaattgtatggtggctgtaaacttgagtaaacagaaatacatatgggcatcactctcctgcacatgctaaaacagaaatgcatatgggcactactttcttacacccactatctctggcccatgaaaatgggggagatgagaaatgttgcaattacgaaaatcatgagtgttagcacccagcttcttataaatccctacattattctctgaggttgtggttgccaagaggtcacctctgcatcctaaactcagactgctgtactccattgctgccagtctccctcaataggaaatagtggctcagtttcagcctggcacttaccctcatgtctcttgcagagggctgatctagaaagatgcgctgtttcttaaaagagtatcaggagcaccctgctatccactgacccaagactcttggtgtttggtcttttctcagatttcccaggttcctcaggtttaccgggcttccagcacaggacaggcagcatctgcgataatgccctcctcttcagcagaattcaacattgttccacttttaccacgggattatgcaacactccacccttgcttggttcttagcataccctttagctgggacaaaactatagtaacatggcactggtccatgaaaaccatgttatctttccgttcatctcctgtctttcagagtcacaaggctctgactgacactggagctctcttctctacagctccctcccttatccaaatgaagagaacaaatgaattaaccatcgacataccacttaagtgggagctcagcactcaggaggatttgattcattcactaaacttcctatgggacaagtttgcatagcctttactaacactgtagctcctctcctttcgtcttatcttgtcatactaagtcttgataccttcctttatccataatgtgataacaggaagctaaacttccttcagctgtgtgttgggatttggatgaaaatgacttatcacaacttcattttttccccagagtttattatgtacaagtattacttgggtcctcaaaggacattaataactaaacttttcaagtgactaaatttccatccccacagagaggcagtagtagcatcgatgacagatatgcataagcaacagagttgctaccaatccttggcaattaatggtgttttgttgttgttgttgttgttgttgttgttgttgttgtttttattcttgctaagcttctattttcatgttcaaaacttggaaagatgaacacacagtaaaaatagcagattctgagagaatgttcaagaaatgaatacacgaacccatcatagctttggtgaactgttcttgtcccaatgttgtacagagcttggctatcccattttttactgagcaattaattcaagatagggtgtgttactgtcaagagggacatagaaggagcagtgactttagttaaaacatggcattttattggcatttctggcagtatgctttcctccaaagccctcttcattttctacattcttccatcttctaagtactggcagatcttgaactcaggaccttcaaacatcatctttataaccgtggtaatggaacatcagcatcacttgctagtataactggagcaacacttgctcaactacagttcagtttctttctactggtgtgtgtgtgtgtgtgtgtgtgtgtgtgtgtgtgtgtgtgtgtgtgtgtaaatacagcacacaaacatatcccatgtgtgtacatacttgtacatgttcatatatgttgaatgtgaatccacacatgccatagcccatgtgtaaagttcagacatactttgggtattggttctgatatttcaccttctttcagacagggcctcttgttcacagtggcgtaaggcaggctagctctgagagcttccatggatacaccatctctccttgagaaaactgtggttatagacatgagctaccacatccaggttacacaggtactggggatccaaaattggatactcatgtgttcatagtaagtcttttctcactgagcgattttcttcagatcccatcatatatattctacatacgtgtatatatgtatacacacacacacacacacacacacacacacacacacacacacacacacgatgtaacacaaagagcaagtaggttgataaattaatgttctccgagcttattacctgcttcagaaaagccataaaagaataaaatcttagagtattttgggcaaaatgagtgtgtgtgtgtgtgtgtgtgtgtgtgtgtgtgtgtgtaattaaaaattatatatatgagtgttttgctacatccattcctggtacccacagaagtcagaaggggctattggatctcctggaactggagttataaatgtttgtgaacaaccatgcttgtgatgggagccaaaccaagttcattcttaagagcaacaagtactctcatctgctgagcaatctctccagccccataacacaatgtatacacatatataatgcatatataatgtgtatataatatgtatataatatataaacatgtattgacaatgttcaattattaagagtgatgaagactgctgggcgttggtggtacacgcctttaatcccagtacttgggaggcagtggcaggcagatctctgtgagtttgagacaagcttggtctatagaacgagttccaggaccacctcaaaagcaatacagagaaatcctgtctggaaaaaacaaacaaacaaaaaacccaaaatacaaaaaatgaaaaaagagtgatgaagacaaatcactcattagaagtaatgacagaaaccctgccttgggaaaacagtgacatgtgttatcttgttatttatgccaagtatcagctgagacattatattccatctgaagccatgaggttagacgcactctttcatacaggcaatcctgataaactgttcactaagagtctttaggatccccacactccttgaacgagttttcaaaagaaactacctgattttcagagcactaataatagtaggtacccaaatgaagttgcagacataagttgtaaactctgccttttcttccctggctcctgctggcatccttatagatgcctcactgtcgaacattttgatctaagctggataaagcataccttcctagggttctctatttgctaatagaaaaagagcctgaatgtggccagtgaactcactgtgaagagctttgacttcaagtgagctcacaatcagcttatcactgcagtgctgcgctttgggttgtaattaaaagattttcttatggaacacgactgtgctgtttgcactttcctttcatgtcctcaaggaagaacaacatcaatcactcatttgccttttatatgtgtgtgtgtgtgtgttttataaaggcagcatggtgaaatacaaaaagccaaggccatacatgatctacttttaagtcctcacactgaaattatgatgtttttgaacttgggcaaatcgcttaatactgctggacttcagtttcttcagctgttcaatgggccaatgttgttggccttgcagcatttcaacaggattaaaataagtaattgatgtaaaacattcataaattcataagcatgcaccaagcaccatacataacatctttctagatttgtttccttcagtattgccactcttatgcaatgctgtgattctcctaggctctagtaagagcctaagaggattggggagaccacttaggtcatgtgattttggtcagagaaggctgaaaaactcctattcatgaagtagtttccactttgatgtgagaatttatccttgccctgatccattccagcatttcgtttctatccccatttcagccatatagcatcatagtctgtgggtcacatgagctgagcatatttgaggaaggcccaactttgtttctgccacagatgataaaaccatgtttggggggctcaggatattgcttgtctagggtagagattacaggaggatcatctcatggatgtgaaaaagtctatcacacccttcaattctactttgcagtggctcacagctcaattcaaagatacattcctgattattctttatttcatcatctgtctatgtatctatcaatcaatctatctgtcatctacctataccattttggctttttgagatagggtcttgttctacagcccatgctggccctaaactcacaatccttctgcctcagcctcctgttgttgacttttctagagtacagagcacataacacaggcatgcacgactactccaggctttcctagtctataattaatacataagagaatggctcctatcttggagcttagctcacaaagaaccttaggaaatttcctgggttttcctatttgtcctcctccttgagaatgccagagttcatctctaattccctttactaccaccttcaatacaaacaggaagaagtgaaatccacccaaaggttctacatctcactgtgccttttagaaatcttacccatgatcttcaaatggatgactaataagaacagtggccatcacaaattatggtgaggacatgatgcaggcagaccgttcctttggaaacctctgtgagaggcagtagaagggatggcgtggcagtacttctgcagaggaagataatgaacagttttggcatttgatggaatttgaaatccaggccttcttgctgtggagttcccctaatctctctcctttgcctgaagagttcaaagtagctaacctctaataccgtgagaatatctatttgtttgttcatcatttaatacaagtttaactaacaaacaaaggtcacagcagcaaagtcaccaagggcatgggccttggctttgcttttcctacttaccctctgtaaatagggaagttcttgcttgtgagtctagtttctccatttgaggcatgaggatgatgatggaatctggcggtgttttggtcatgccatggagtactcagtatattgattatattgattaaggggaaccatgacaacactgtagataacacagccttggtgaacctcataatcagctcccctctacactactgatgactgctgcactgctcccattcttgaagtctctgaacctcattttcctgtgggctatctgttgagaggtcaagtgaaaagcacattggaaaaggtaaagggacaagccattgtatttggtaagcccactttaaagactgctgtaataaaaagcatcaattaaatggagcatcccaccaatagagggcagtgtctttcaaaaacctagtgtggggtgagggcagatctgcatgcttttccatctattatgtcagacatatcaaaatagctagaagacttgcctgcccccaccttccgccctctcctccagatgagtgtggtctctccctccatcccctgttcgggcttgctggatctgcttcactctagtggacctgctcaggcaggacagacaacctggagtctgaacacacctcagtattggctccccctccaccctctgcccaccatttgagtattggtcccccaagccctctgcttgagtgaggagaacaccaggagaggctggaccatccagagttactgacactgaagtcttggcccacctagtggagactagaggagagggagagatcccacacgcacccactcaaaaaagggatgggaagacgacagtaagaacacactcttcagggagggtgaggccctccatgggggaatctcaaaaatctgttatatcatctggggcaggacctaggctcttcccaaggtgtccaggctgagagagaatccctacatgtggaatgggctcccaaagtctattcctacaccaggaataaatactgatctactacccaaggccccatagatttcctaggcctcctcactgacacccacattcagggggtctggatcagtcccatatggcctctcagccatcattctggggtccatgaactcccctttgttcaggtcatctgtttctgtgggtttcaccagcctggtcttaacccctttgctcatcactctctgcacctgggttccaggagttctgttcagtgtttagctgtgggtgtctgcttctgcttccatcagccactgtattactctaggatggcatataaggtagtcatcaatctcattatagagggagggcatatagcctctccactattgcttagattcttagttggggtcattcttgtagatctctggacatttccctattgccagatttctctttaaatctataatggctccctctattatggtatctcttttcttattctcctctattcttcccctgactcaatcttcctgctccctcatgtccccttctccccttctctttctcctaactccttctcccttcccccatgctcccaattttctcaggtacccttttctggggtaccatgcatatctctcttagggtcctccctgtttcccagactctctggcagtgggattgtactctagcaatctcctgctccatatctaacatccatatatgagtgggtacataccatgtttgtctttttgtgactgggttgcctcactcaggatagtttcttctatcctgtctgcaaatttcaagattccattgtttttttttttccactgagtagtattccattgtgtaaatgtaccacattttctctatccattcttaacttgaggggcatctaggttacttccagattctagctattacaaataatgctgctatgaacatagttgaacagatgtccttaatatattattgtacaacttttggggtatatgcctaagagtagaactgctggatcttgaggtatactgattcccattttcctgaggaacctccatactgatttccaaagtggctgtatgagttggcactcccaccagcagtgcaggagagttcacatttctcaacattctctccagcataaactatcattggtgcttttgaacacacacacaacaacataaagaccaatatgacaccatcaaaatctagggactccacactagcaagacctgaaaattccaacgaagatgaagcagaagagaaggaccttagaaactactttatgaatatgatagagaatcttaaagaggaaaaaagaaaattccctaaagaaatagaagaaaaaaacaaacaaaaaatacatgaaacagaggaaaaggaaagcaaaaaaattaagaaataaacaaatctcttaaggaatgtaaataaagccaagaaaaaacaaccaaacaagtgaaggaaacaattcaaacagttcaatacttgaaagctgaaatagaaacaataaagaaaacacagaatgaggggatgctggaaatagaaaagcttggcaaataatcaggaactacagatgtaagtataaccaatagattataagagatggaagagagaatctcaggtgttgaagactcactagaggaaatacagtcatccaccaaaggaaatctcaagtccagcaagtccctaacacaaaatatccaggaaatacaggacaccttgaaaaggccaaaccaaagaataacaggtatagaagaaggtgaagaaatacagctcaaggttacaaaaaacaaaattatagaagaaaacttccccaacctaaagaaggatatgcctatgaaagtacaagaatcttacagaacaccaaatagactggaccacaaaaaagaagtcccagagctacataattatcacaacaccaaacttacagaataaagaaaaactattaagagcagcaaaggaaaaggctaagtaacatataaaggcagacctatcccaattacacatgacttctcaatggaaactttgaaagccagaaggtcctggatagatgttctacaaatgctaaaggaacctggatgccagcccagaccactatacccagcaaagctttcaatcactatagatggagaaaagaagataacccataacaaaataagatttaaatgatacatatccacaaatccagccctatagaaagctggaaggaaaactccaacccaacaaagacaactatactcacaaaaacataggcaatagataatctcactttaccaaataccaaaagaaaaaaaggggtggagtgaaatccacaaacaataactccactaccaccaaatccaaaacaaacaagaattaacaatcagtggtcattaatatccctcaacgtcaatgatcttaacttgcctataaaacaacagaatagatacaaagacaaaatccatccttctgctgcatacaagaaacacatctcaaagtcaaagacagacgttacctcaaagcaaaagtttaggaaaagattttccaatcaaatggacccaagaaacaagctggtaaagcaatcctaatatctaaactagacttcaaactaaaatcaatcaaaagagataaagaaggtcatttcagattcatcacaggaaaagtccatccagatgaagtctcaattcgaacatatatgccccaaatacaaaggcacccacattcacaaaagaaacattactaaagctcaaatcacacataaaatctcacatttatagtgggagacttcaacaccccactatcaccactagacaggactaccagacagaaacttaacaaagaaacaaaggaactaacagaagttatgacccaattagaccaaattgccacatgagaccactttctgaacataatgttagtagcagagacactgagattgacaattaataaataggacctcctgaaactgagaagcttctataaggcaaaggacacagtcaacaagacaaaatggcagcccacagaatggggaaagatcttcatcaaccccacatctgacagagggctgatttccaaaatatacaatgaaccctcgaagctagccacccaacaccaaataatccaattaaaatgtggggtacagaacttgatagagaattctcaatagaggaatctaaaatggctgaaagacacttaagaaagtgctcaacatcctagccatcagtgaaatgcaaatgaaaacaactctgagataccatcttattcttatcagaatggctaaaataaaaaacaccaatgacagtctatggtggagaggacgtggagaaagaggaacactcctccactgctgtttggagtgtaaatttgtacagccactttggaaatcagtatggtggtttctcaggaaattgggaatcagtctacctcaagacccagcaattcctcccttgggaatatacccaaagaatgcacattcatacaaggacatatgttcaactatgttcatagcagcattgtatgtaatagccagaacctggaaggagcctagatagatgcctctcaaccaaagaatggatggagaaaatgtggtacatttacacaatggagtattactcagaaaaaaaaaaaacaatgaaatcttaaaattctcaggcaaatgaatggaattggaagaaaacaccctgagtgagataacccaatcacagaaagacaaacaaggtatttactcactcatacatggatattagacttagaacaaaggactaccagcctaaatccccactaccagagaaactaggaaatagggagtaccccaagaatgcatggtcccccaaagaagcagagggggacaagaacccctgaacaatttgcgagcatgggggagagaggagggacataggaaggtaagagagggagcaggggtggggggaggagaacaggagagatcaggaggattgagacaggagaggaatagagcagggaaagaaaggggatgccttgatagagggagccagtataggtttggagagaggtctggcactggggaaatgttcggggatccacagggatgatcccaactaaataatctaggcagtggtggagaggatgccattgatgcccttcccctataatgagactgatgactaccctggttaccattcctagagccttcatccagtagctgatcaaagcagaagcaggcgcccacagctaagcactgaactatactcctggaatccggttgaggagagggaggaggatgattaaaggagttaagactgtgttggagaaacctgcagaaacagttgacctaaccccgagagagcacggagaccctagttgtaaagctggggaaccagcattggactgaaccaagccctctgaatgtgggtgccagctaggaggcctggtaagtctatggaacctctaacagtggagccagtgttcatccctagtgcacaaatggacattgggagcccatggaacgatactatttcagaccagatacacgaaagaaggccttggccctaccccagatgatgtgaaggactttgatggttccctgtgagaggacctcactatccttggggagtgggttgaggggccagtgggggagcctggaaggatgggagggagagggaatggggggattgataagtaaaataacagtgcttctaaaataaaaataatagctagaagagaagcttctaatatgtacaattactgtctgctaattaaaaataaagttttcaaaaagtataaaaggaaagacaactggcagcagtaataacaaaaggaaagatagccagaataggggaacagtgtaagatatggctatacaattgaaagattctggccttcttgaaatgtgggatatgttcctaacaatgagtttctttttcttgatttggacatgtccctcctctccaagttaatttccagggcctaggtttagggttctacatggaggcagtttgaggtgatggttaggagggaatctttacagtcaagtccatagggttagcctttagcttatttgtttattcatggaaactttagttcatctaagtctcaatttgttcatctgtaaaatggagaaaataataactatttcagaggattgttgtcaagactgaatgtaataacaccatgatgtatttagcatagtaatagctcttaataaacatctagtcaatttattcatcatccttctttaaattttttgaaaactataatgatggttgctttttaattgtgtacctcaccacagcttgcaaaagccatacttgtatttagattttatacttaaacacacacaattccatgtctgcgtctcctcatatgtcatagattccaacacaaaaactcaaactctggtacaaaaatgaggaattgaaagtgggcagaaatagtggtatttctagaatgtctgtccggtttagtagaatgtgcaatgggaagcaaacagtatcaagacccaaggtgagctgtgtgtcaagacccttcctttctaataaactaagctcttattagcagtggataaaaggcactaattaaaaaaacctgtatatgatatttttaccccaatgcattttttacatctaatgcaatgtacatagtataaataagtaatgcaatcaagtttatctttgaaagaaaaagttaataatcttactgaagaattggagataaatagtgttcttattgcatttattataaatcatacaaatcaaagctactcagcttgaaatgtgccctttgaatacacttagacccttcttatctcctatgctctgttgcagaacagctatttgggactggccaacagccaggaagatcttccaagtctacttcaagacatccacacaagacacctgaatccattggtgtcctaactggtagattaagcttccaggtagttgtgctcagggtcttgggacctagaagacattgtctcactcagcacaggggtgacaaatgcacaacaaaacagactcacacatgggaccatgaaaaaataacctctggttctgtgaggcttcagtgagctgtgtgagggaggtgtggaaagagttggactccaagtagatagtggatgtggggtgctaagaggaaagagtgaggaagaagaggtggccaggtaggtctttgtggggtctcccactggcctctgctgcctggagagtttcttcaaggtcaggactgtagagaatggtgcagaaactggtcaaacatctagtatctttgtctttaggaaggttaatttccatattttgagcctgttttcccatgcttgggatctagaattgctgaacagagagagggacctggagaggtcatgttagtgatgagcttttgccccagggtcctatcaccattctgaacaaaggctgaacttgtcccatgtgcattaagtttcttcttctgccttctgtttttacccatcatctttcctttctctagtaattttgatgtttccactattcgtattttattctcagctttaaaagacacacgtctcttcaacaaaagcaagagcaatatccagttactttcttcaaaccttgcctacaatccccactgtcgctgcctttcctttgagaaatcttatgagcttgcccttgcctctagctgtgtcatgattccccagtgtctctaggactctgttgtatccttctgtggtagccctgctataggctgacattttgagttgtttcatctccatccaccaccccttagtagcccatgagttaggattgaaatggagatccatctctcatctccatccctgtgcttgtcactgggctagggacttagaagatgctcagcatggcagaaattttctttcatactttagtgtattagtcagccttttctagaggaaaagaagtgatagccagatagacagggaaaggaagttatcaaaataaatttaccacagggtaataactcacactgttatggggaattggatgtccccaggcccaaaggtgtcaccttggaaagacaggagagctgctagcatgttcctagctcaagtccaatccaagagtcaaagaccaggaccagtttggatacatgactactctctcagatgctttcctcttctcttccagtggggcatgctaacacccaggagggaagtcaactttccataacccagtgtagatattaatgtcatagagcaagagtcttgtggatacacccagaataatgcttaaccaaattatctgggcaccctatgtcccagctgggttgtcatataaaaatcatctattatactggtacatcatatttcccattacccatcaaaggttctattttgttctatgaaacattgatgccagctctcagaagaccccttcagctccctctagttctaaggactgcactgatttgaagcccaaatatggttcccttccactgtcttgtgttccatgagcaggcagagtgggttgctaaaattctaagttcactgaaggtggttgtcatgtgccatactcttgttatggaacagggcagaggaaacacttcaaaaaaaatcagtcctttgtacaaaatatgcatatattatgcatgagccatcaggtatcaatgatatgctagactgtgttagttttgcactactatgataaaatgcctgagataaataacttaacaagaggaaagatgcattctggctcagggttttggaggtgtccattgtagcaggctggctccattgcttttgggcttgtgggacacatctaagcaaaagcttctcactgcaagcaactgggaggcagagggagaggagaggggctgaggtttcagtactccttcaagtgttcttcatttacctcacttaaggtaccatagatgcatcagctggggaatagacctttaacccatgacacttccaggggcatttaaaatacagattggcaatatctaacataaattctcctcttttccatgagaactagaactgttgtcatttttggatatggcaatgtccttcagcgccataccaaaaattatgaatgatacagtaaaagtgatttggtaaataattacctgaggggtttatatctcaagtaaagagctgtatttgttcatagaattcagaataatcaatgagagttctaggcagatcttagattacctagtgtacataacaagctctcataggaggaagggcctttataaactatgctgttgctttgtccattctgtgttgctacaacaaaacactggaaatttaaaaaggctgagaactttataaagaaaagaaggttgttaggcttatagctatggaggataaaaatacaagatcaggtggccctatctggttagtttcccgtgagagccatcctgctggatcacagcatagtggatgatgtcacgtgcatgtaagagacacaaggaagagcgaggggaagacgatcacatgacaacaagcagcagatcgggtagtgtccagggttgctttgataacagcctactcctgtgaactaaccccagtgtaacccactgtctggagagaccaattttcaactcttctgaggatgaggcctccatttcttaaataagcggttctcaaccccgaagtcgcggccccagtggagtcacaaatcagatatttatattaggatcataacggtagtaaaattacagttatgaaatagttatagaataatttcatggttgggggtcaccataacatgagggtcgcagcattaggaagcttgagaaccaatgtcttcaatgggttcaccggcctcaacccaaccacacaaggggatctgctttcagcacctaagtctttaaagaacacactcaggccatatccaaaccttagcagacgctagtttgtctagcttcctaggcagctaggactgatcaggtgtccaggcactggccaggcaggtgtaagcagcacctttgtgaagggtttcaaggggcattcttcaggggcgccgcctcagcaggatgctgtgtgttttctgttccctttcctcttctggttgccaggacccgagactcgatgcctgagccccagcagcctacgcgagggtggaggctatgtgctaagaatggtaaagcagagaagatgtgagctgtcctggttcctggcggctttgtagtgctgccctccccgccccggactgctcatttccggatgtcttttacatgaaagaatagaccggtgtggctttaaacctctcaacagaggtttttcttttcttttcctttcttttcttttgggttttctattttatgtagcagaacataatcctagctgaaacagacgagttaatttttgcaaaagaatagaaaaaagtattgtctgaactaaaggcaatttttttttcagttacaaaagggcatttatactaatatctgaggaaagagtgagaaatgactctcagatctatttggtattacgaatataaactctaccccatttttccattttcttttccatcactccgaatccttcggtgatgtgtggctttgccttgtcttcccgtgcaaggatgatttccttgtaaattagagagaaaaaaagaagaaagccttgtaaatcatctctctcacttaactcgcccattgtcctctctctgcaggaagcctacaggttgcagaagaaaatggctggtggggatgcagtgcggaagatagcgtggttttgaaatgaggtgagaataagtgaaattagtgtagcagcagccagagccatgccggtttcttggcttcccaaacttaaaattgagagaatcagggagaaaaggcctttgttttaaatgagacagagacaagggcacatctttctcaggaccacagttaatgagggaggaagaggaccctaggaggcccagtcagcactcccagctcttctgttcatctccctgcagcttaacccatcaggccacagggggggaccattttgtactcctaggctacagtgtgcttagagaaaagtccattttttagggctttaatactttagaaagccactcacccagaatatggacaccaagttatggtcctaaaactctccagcttgtcttttaagaaaagccacaatttattaacaaaatcagtgaatcaatgtgtgtgcatgtgcattcatgaatgtgtgtgtgtgtgtgtgtgtgtgtgtgtgtgtgtgtgtgtgtgtacacatgatgaaacaattgcttacaatttctgaagtagagactagtagggtttggtaagcaactaaccctactttagatagagaaaaaaatgacactgagaatggtggaccttctagaccataggacagaccctatgacctgtgggcagaagaaagaaacctgggagccctgtaggactcaccactcagagggctgacaggtagtggctagttactgtcaaaaggctcatctgcacatttccatgactggggataccataacaagattctcagagcttctgttcagagaccccaagatagaatagcgtgacacttgataccccaggcttagaagtcacctgtgtcacttctgtattttgcactttatatgtaaagccataacaaaggtgcacacaggctcaaagggatagataatataccaatcccttcagtggtacaaggccaaagtcacattgtacaaagtatatgtgggataggacatgttatcatcactgcattggccgtcacaggaaaagcacattgctaggagagaaactggaagtttatcagtcacctcagcagccccagagctcatctgtgaagcattcattcctcaaagctgggaggcctcaggagtgaagattccactcccaccccatactggtaccatgggcagggccggggccacagtctctgagctcatgaaccttgcagaaatgaagactcaaatatagtcacctttccaggttccagaacattcggtaaactctgtgcttttctaaaaataaagtggtttgaggagactgctctctcctgtctttgtccactgaaaggcaggcagaccaccccaaactcaggtttccatggcagtgggattctgtgctaatgcctttctgtcccagccagtctcaagccttggggagggagggtgaggcagtccatgctgggagctggcctccagacagcacagtctctatgaatgccatactgacattagttcttattgtagtgaatgacagaaaccaaagctttcctcttatgtgggtataaacaagatcacattaacaggaataaaaaccatatttcaggtgtccataccatcagccaatctaaaaactcagaaggtaggagtaacctcacctatgtttactaaacatttgcctcttttactttgctgcaagccatgtggacaagggtttctgctcccaaaaccattcaaaagagtgcctctcccactttacggctggcagtggggtccctgtctgtgctttcggggacagagcagttcaggaagcaaaatgcagcagatgtggaaggaatatttcctgctcggatcctctcttcctcagtccctgttttggggcctcaccctcttacctgggtacacactgcttgagtccttctgcatcgcagagccccagtgatgacagtctccctggcccctgcaaacaatctttctctccacaggactcagatgagaatccagggaaaccaacttaaaaatagatgctggtagacagcctacccaccaggccattggatatttccagacatggctagtcctcagctcagagcacaaattagaccaaatgcgaatctctgctacatttctcacggtgaaagaacatcatgttttttgttttttccccaagagacaactctgcactagggaagactgatacacaaccagtgtggcaattgtctttcatgggatcaacttcctttttaaggaggtcgagcaaggccttaaatgagaaaaagaaggagatgtgggatgagacaaagatggactatatttcaggagcagcaatgctggatgtctccctggagtcacttcttgtgacaggtcaacaagcttggccaggacaccttagacagcaggtgccttttcctctctgtgctcactgcacgttgggctggtgtaacagtggtcacatttcataagaccactttaaatgtcggtcttccccacaaaacttctcttgtgccagcaaagtgccaggcatagggagggtacttgataaatatttatgggtagacaagtttcaatggcttaatgtctctaagggaagaggcctcctcctaccctaaaggacatttgggaatgtggggacatttttggttggcacaacagtgtgaccagagccacagacaaggagaatcttataatctacccttcatccaagactattctttctctgagaataagtgtaagcaagactgtatttcaggaagccccaggccctaaagccttcaaatttaactaggaacattttatctacctgcaaccttgctgtttgacttttagagtctgggatggtaaatgagaatggcctccataggctcacatgtttgaaatacccagttgccagttggtgggactgcttgggaaacattaaaaggtgtggccttgttagaggaggtgtgccactgggggtaggctttgaggtctcaaaaacctataccattcccagttagcttgctctctctctctcctccttccctccccccttgtgaatcaaaatgtaaactctctctgctaagtaattcagtatacaaacatatactatatacacagttttaacgaacatttctcatctgagctgaagatagtactctctccaagagtcaaagaccatctaacaaaatttccaatactggcatgagaagctgtctcttgagttgttggccagggttgtctaagagactcccaagacagagcatattgctactgctcttggttaaccccctgcagagataattctctatagttgaaggcatcatgtacttcaaaaatagggcccagaggcctctgaactggagctaacctgaatgccccttccctgagggctagatttcatggtaccagaaggtaccatgcaagcttccaaaggagggaggtaaccagcagtcctacccagctttgacacctataaaccacatcagctaccagcatgtcctgataatcctaaggatgcagtagtggcacacacatgttggtggcaaccaacttctcttcaattggacttaagacctacttacaaaagggaaaccatgtctggtctgggaaactcacctaactaacaagtgctagtgaattcatggtgattaaaggagaatctacaaacagcaatctactaaaccagcataaatcctaagaacaatctatcaacatttgtccttacatccaaagataattaaattcttcactcctcatcaagggaacttctatttacaacaaatggagactattacagaaaaccacaaccaaccaacatgcagagttgtatatcccagtcctagtggctacaccaacaaagcactcccacctcaaaagctcagtgaacaatagggaagaaggcagggagtttgctgtgagattgtgtctcccggtaacatcagaagctacacctgaaaagtctaaccaacatgagctgaacaaggaggccatcaatgaacagtccaaactgtacaggacaagtccacaaggtctcgaccctccataaccagttacagacaaccgagtacaacgaagtaaagctgggagtgggagaggtggcccttgccagggaagagcacatcaattggttgtccagtgccaaatgatcatccctgaaaacacacatatgaataagatgctgacttagcaggttatatttaggaatacatatgcataaacaaataactttggaagagagtgggaagggatagatgggaagttttagagggagggagaaatgttattagaatacaatttcaaaataacaacaaaggaatagtgggcaagtgcaggttctctagatccactcaagatgacagaataacaaggtcagtacaagagcctctagatccattgtcttctaattatgttctacatattctactcaacacatctctttttttttacttgaatggagtagggtggtctctgatgctttctagctctaaaattaaattactctcctcaaaagagaccaaagtcaactatctgccacattacaaagtatcatacctgtaatcacaatatgttttgtaatcaaaatgaattttgacatggaggcatctgggatcccttctatctccctcttggttttgttgaaagggtcttgcaacacagcctatgacctcaaaaccaatattcccctgcctcagcctccaaagcatagtcatgacaggtgtgtgcttccatgcacaggtggaattcttcccaagtgtcagaatctcatgatttcagagcagcaagggaaggcagagggaaactcttcatccattcactggttccttcatctattcatttatccagcagatagtctaaagtaagctagaacacgctggcctccatcacagatacattgcaggtagcggtgaatacaatactgctgtagaggttccatggtcaggtgaaggcagagggacagaggatgcagagctcctgggagggacttgtgaaacagcagctcagccagttctccttctcagaggaggaggcaggggagctaggacttactgggaagaagaggaagattttgccagtaggaagatgggacagtgggtttgaaaggacactcttggcatgtaggaaaatacatttgggcagcatgaaattctgtaaaggcaattactgataatagtaagaagtcaggtttctgggcacaaatagagctggacagataaatgggggttagattgtatgctgagcattggtctggtttttttttttttttccttctgggaagccagggagctgagatacagcagagagttagccagagggttttaagcaagggagtggcatggctggagagttttcttttctttttaaagatcacttctgggaatctacaagtgccattagaatgcactcatctcaaagctgggggctcattggtgaacacaggattctgttctcaggcattaattgttttggattcagtgtaaagctgagtgttatcattctattccctgtgagtagcaggcatctgaaaagttgggaaacatacgataagcttatttttaagtaacatgttcgtttcaaataacatacacattatttttctttcaaacgctaggcatcttttccagcgaggcacctctacatttacaataatgggttccattgtgagtaggtaaaaaaaaaaaaagtaccacatatgcaatgtcacagttggataataagtcacatagtcacattatctaatgtgagtcatcacagctctcacagacgaaggaggaagaagatggcagagccatggtgtggcttagattcagacagagcatgcacccatgccacttgcagttcattgcagaaagcaagccacacaccaatttctagttcaaaacaccatttccagggtgctgatggaagtcacatggataaactcctgtgtgcagatagtctgtgtacttatgcaatacatacagttccagatcactgacccttgccaagggtgttccttgggcttcttcaaaattgattggttgattgatacaggctctgccaagtggttggaggatgtgaggaagggagcactctggacatttctccctgtttctctgcttctggtaacatctctgagtgtagccacagcagtcttcagggcaccagccacccacgaacagtcctgactcatgctttccagtcatcgtctagctttacccatctcaaatctgtctagggaggggaacttatttagaggtgcactttcataaatgtggggaatttaattatttttaagacgctgggttatattagtagactttaaagagttcgttaaagacattcagcatataaccattacaccccgaaatgattcatttaaagctcctatgctttgtatcgaccttctattgatgtctttgatacaataaaggaagcacatttttaaatttggaagggagttgatagagacactgaagaaaaaaagaattgatggcatccagacattttttttttttttcaaataagcactgactgaatgggctagtgacagcctctgagacaacggagtcacatgatgcatcccctgtatttaacaaggggattttgcttcaaggtctatagggagagaagcagaaagggctggtttctagggaacagtttgtcagtcctgactcagtgtgttgctggtcttgcaacagcagcagctgctactggggaagcgctgtggaaccagccctggcaagtggttcctgatggtgcagagaggccccaggagagctctctccagtggctgtcaccatagggcaagctaggggtgcttatgggagccaggctgtcactgggggctatttgagtcaaaatgacacagcatcctaggggggatattaactaaggagtgttgtggcaatgggcttctcatgctcctgagtgtggactacagagacagaatgccctggatttctgtcccagtctagccacttgctagctctgtaaactcgagcacattatgtagtttctttgacccatagtctctgccttcataaagtaggaattataatgccttactgggcagcaatagaactaaaatgcttgggttatgaaggcccttaatgatgcacagtttgggtgataataacagttatttgtattcctatatttgtaaagtgcttgtaatgctataccttcattttccttccatgttacggagatctttttaaagcagttttccccctacatagactaagtacctaaatcccagagagaataaaaacaacaaaatcaacccttgtcctggattagataactagtgaatggcaaacatgggcttttaacagtttctcaatatctttcctgtggtcctgtggtcctttctattcagttaggaacaccatacacgacagcttggtgtctgagttcttctttgccatatccttctccaaaacagtgacagagtatgttgatatggggtcatagcagcataaaaatgcaacttacttcccttatttgatttgggtccaaccctgcataggtccttctcttttgacataccttaggcttaatcattttctctcttgaatttcactcagcatttaccatctcttaaatatttttgacataactgtggatactgtttttaaattcacttagcacttctgagggtatcaaacgcaggaaaacgaatgcttaaggttattccaggacctcactttgtacagaagaaatgaacttgtgaacacagaccacagtaccttgtacacacgagggtaactgaagaccatggtacaccaggaacctcctaccagtaggaggcagcatagcctggtggttgacagcataggcttgggagtcagatggaatctctgggtttgagggtcagcccctcagtccctccagtgtgggataattgtatagacccagtgatctctgcatctctgttttcttcacctaacatggagggatctcaatcatacctgcctcagtgggagtgtggggcttgatgaaaaatattgaaaacattaaatatgtagaaatgtttagaggtagccatctcactttaagtacagagtcaagcaggttaagggcagggagtctctgtgagaggacacgcaaacatcctatcaaagccatttcttattgttcgaagaaggagagtaaacaaggattactcatcactgaaaagctagagtttagggtgatttgtgaaaaaggatcaggatctcccttcctgtctgcagccaaagcggacacctcatagctctgcctcaaactccattggtcagcatcttcacaagaggctgagggaatgaccctgaaggtagatgatgagtgactgtctagggagggtgacctgtttgaatggagctgatggcaaagttttggaaaaatcctacctcttccaacctgcacggtccagctgtgtgctaaacaaagagtggtgcctgtgatgtcagagctctgaacagaacctgagagtgcatgtttctgggtgtgagaaaacggtttacttggtgaatacttgatttctttcctagcattccttctcaccaaaggatagacaccggttgaagtcatgagggtagttccactccgtgataggcgagatgatcattttccatttagctcccagccaaggcagaagttccccaggctaaaacaaaaacataggagtgacagcaacaaaatcctcatagccagaatgaaatacagaggtcgtcttctttgctgtggtattttgaaaaatgaacttgttggaaaagaggcatggttaattctttgacaggctggcatgcttgtgagtttcaggggatcccgtattctgggatggtgtgtaactgtgtgtgtgtgtgtgtgtgtgtgtgtgtgtgcacgagtgcgcatgtgtgcatgaatgagtgtgtttgtggggatgaggaactggtttagaggagattgctgtggctcagacagggtgggaaactcattttcatctggaatccaatgcattcaaggctggataaaatgaaaaactttattcagcatctcccgaaagaagccactgcagatctcctctctcagcatctgggaccacaaatgccacctaagccacacaggctatgtccatgcacacacatatgtaatttttaatatcctcatatggccagcatggatttgttccattcagtgggaagccacaacatttattacatctctttctcaaataaacctcaaagcaagcatttcatctttcctcatgtaatcatcataaggtagaaaatgaaatttcccaaacctaaaagcatgttgctaagagctccagggcactgcgtgtcacttcttactttgatgtgttcatggagggggtggggatgcagagagagagagacagagacagaaaggggggggggggaaagaaaagagaaagacagcacaacaccttccttgaggttttgagagcagctttttttcttttttctttttctttttttaactccttatagaatgacaagatggagctgattaaaaagaagacaaggaaagtcggtgtgccagaccacttcagaaacacgcattccagaaaggcatgtaggagctcctgtcggaagcaggaatgatttcacggccccttttgcatattaatgaactacacgtaaccccagcttagcagtgcagatgcagccttatgggaactgtgccagaatgccgcgataaataccagctcgaggggaaatgcatttcatgatagaattaggagagcagccatctgagacgtccacagaatccagccccctacccaggaggtaaggttcctgaggagccgagtgctggtggcatatagatggtggggtatcccaggtcatttatcggaatctggttttggctatgagctccatcttcaagtgccacactgcctgtatcctcaagcaaagacaccatgcacccaaaggtcaaactcaggtgaactgatgaattttgctattttcctagtgtgaattaaaaaaaaaaaaaagctgttcaaacatataatcttccttgcttttgtagcaaaacagccccccttttttttttgcctcttctccacccccacctgcctgtcaggtgctttgcatcttcctgcaacctgtgggagcattttcagacagaaggcaaactcttggcaattctcttctgtttcagagctcctccaggatctgctgacttctcaccttgttcgctcaatcccctttgccctatctgcagagtacaaccatccctgtcttctgtgctcaccatctgtttccaaaattcctatgatacagaaatcacatgaccgtttgaggtgcagccatttcaatatcgaaagcttttggcagggtttggcagcaatagctgcaggttctgctggatcagcctgaccagaccacacagggaagggtggtagtggtggtatgtgggtgggagggtccacccacacccaagagggtgctagccctcttgaaggacccctaaaagcagctctccactgtattagatctttcttggagactgaaaatgtagaataatgccacagctttcattttcagctgagacccatactagatttcagccaaagagaatacagggacgagcaatgccatgctgtcatgtaagaaaatagctcactttgaattgagttcgttcttcccccaaccaatccttgtcacattaacgctgtgtatcaaaacactcagctctgtcagcttaatacagctgtgatttggtgttgctcagaagtctgtaggtcatcaggggctggatgacagggagcgggacttctgggcttgcctgcccacatgctataggtgaagttgaggtccacttctcacggctctcatccttttggacaggtagattagctggcttgtgctttttgagtgatggcaaaaatgggagacagttaatccaactgggtttgtcctgtgtctgctagcattccgttggccaaaccaagtcatatgactaagtccaaggccaaaggcagagacatttatgtcaccagcttaacttcaatttcagtataggttagaaaacacactattttcagggatagagaggaagtaaagataattaaatttgtatctggctatagaagacagataatgcttacctaaatgttcacacactttttaattaattaccttgatttttaccttgtaccataattattcagcacttaacactgttttagaaatcaatactctaccacgctcaagaaacaggccatgtagatcaggcttaagttaccagtataagccaactgtcttatttatggtttctattgctgtaacaaaacaccacggccaagaacaatttggggaagaaagggtttatttcagtctacaattccacattacagtccatcattgaaggaaatcagagcaggaactcaaggtgaaatctggaggcaggaactgaagcagaagccatggagggatgctgcttcctggcttgctcctcgcagcttgctctgcctgctttcctttacaactcaagactgagactgcacctttaccaatggcctctcctaacctctcacagtgccaagcctcagcagctctctgtgatcccttcaggttttcaaaaccagtacaaactgagagactctcacatattaccctctggaccatagcttttgtgtgctgactgaggaactagttcccaggagatctaacctcaaagatgcttgcctcttcttaatcaccactaacttctcaacttcaggtaacatgtagcaattaatggagtaaagtaatggtaacagtctcttgttaatcatagccaactctggtactttcacatcaatggccttgatttattctttgctttcctctgaaacttcacaagccaggcctccaatgtctgaattgctgtcagcattatcctccaagttcccacaacatatcactaaatttgcgacactcaatgacttttcttgtccgaagttccaaagtcttcccataattccccccaaacacatgtcaagtctattacagcaatatccactgcctagtacaatttctgtattagttagggtttctattgctggatagaacacatggctaaaagcatctcggggaagaaagcttttatttccatttctggttccacatttttacccatcattgaaggaagtcagggaaggaactccagacaagaatgtggaggcagaaaaccgaagcagaaaccatggaggaacactgcctactggatttttcctcatggattgcttagcctgcattttttataaaactcagtaccacttacccaaggaagtcaacacccacataaatcattagtcaaaaaaatgcttaacaagctggtgcccaattagagtgtcacccctactggctagtgttcatgatattgtaaggtacactgaaagatattttaaggtacactgcccagtatcagaggagaaaggttatcatcaatataaccagctaccaatcctgcaaccttctgcagcaacctgcccacaagatacactggtgtaataatggcatgcatgttattggagtaaccaatcactttttgattagatttaaggcttattccgtgagttacaactcatatgtgaaaccgatgcagtggtcaaaacccgatactaggtaggtcatgggcctatagaaaacatactactagtattctgctaaaggaacatagcaaagaaatgactcttaatgacatatcactgtatccacaagaacagagtaaagaagcaagtagttactttgctgtattttaataagcaaattctgtgtatgattatcacaaaacagaatggagactctgaatccagtcactgcagccactgctcctcctccatgttccaaaaggggcctctcactcatctcctttccagccttttcatttggtcatgtccattccccatgaaaactctgccacttggaccaaaacacttctttctactggctagcagaccggtgacagagattctgtaacagcagtggctccctcaacccacatctgttacgataaatctttccgccaaagctgcccgagccctaccgccacgtgggcggtctctgccagccaccagagttctgcccaccatttggatgtacaaaataatacggagacatattaggtacaaagctgcttggccaatgactgggattctcatctgttagctcagtcttaattatcacaaatctatatattttataagacttatcttacagaggatgccttctgcaggcaccctctcttgccggtggatcacactgtgctgctggaggaagagcagaggggaaaaaggacacttcctgtttctccttgcttaaatatgagtctccttgctatgtcacttcctgcctggaacaccacttctctactacatttcccagaatcctctttgactcctagtcctgtctaacttgctgtttcactggccaaacagtattttatttatcatccagtaagacaaacacatagaagcacttcccccatcacacatcagagaagctttttcttgtagtagataggaattagcacagaaaaccacaactggacaatttggagcactcagtgctaagtgggatttcttcatcaaactcttcccctcaaggaccagagatctgtgtggaagagaaggtggaaagattctaagagccagaggtgacagatgactctgactaaacaatgtctttcaaatataacaggactgatgcacatatgaccacacaggaaactgtagtagcaagcacaagagttgtccaggcacgagccagatggagtcacagcactgagagggtgaaatggacatggggtttcaccactaaacaagaagatatgtgtgattgatatctgttggcagcggtaaagtcagttttctctaatggagtatcactgggtgtattaaccattctccagggaaggcccccttttaagagtagttggctaacacaaaacatctctgtctgtctgtctgtctgtctgtctgtctgtctgtctgtctgtctgtgtctgtctgtctgtctgtctctctctctctctctctctctctctctctctctgtagggcttttgttttggcattttttgttctactggttttgttggtttgtcttgatttttggttttgtgttcttatgagtttttcttttctttttagaacaatgtaagagggagagagagaagaacatacagttggggcagggaggtggaaaagatctgggaggagttgggggaggagaaacatgatcaaaaatatcatctaaaaatttaataaaaatagaaaagaaaatgctcaacagacttgcctataggccagtttcattttatcaattgagagtccctcttcccagatgactctggcttatgtcaagttgacaaaacaataaccaagacatcaaccctctgtttacaattactggttaaaagataaaagtgctctgttattcagcattctccagagacacaaaaccagcaggatatatgggaaacttattagaggaattagctcttgcaattatggcggcagagaaacaccctggtgaccacatacaggccgaaggccctgggatgtgcattccatagtgccatccaagttctaaagctctgtgccagtaagaccatgtaggtaactcagcttgagactaaagggctgagcacctgggaaggagcctgtggcagagtcctgaagtccaaaggctaccaggagaccccataaccctttgtgacagacaccattctgccttcttttgcattctgtctcagcaacctcccccacgtcactcaatcacactaagggctcaatttcctttccttggctcccttcttttggttcccaccttcacatacttttccagagctctgtttgatgtttctgttttctcccccagctgtctgctcctgtgttggttttagaaaggacttggacggcctggagcttttcagtctctgagctcctgtcttgtgacggctgacatatgctctcaaaaagcagttgtttctaagggacgctggtgtgagcacgtatcctggttccatgactttggacacactcatccttctgtgttgcttttcccctccatggaattacattcatttacatcccttcagggtcatggaggtggactgcattcatcacctggagccacacgaacaaaggctctatagtctcttctttcccgcctcagtacatggagatatagttgtaaagcgcctggtgcagagtaggcaccgaacattaaacacatcattcaagtgagatttgcatagaggagctgctgacaccatcattttcttgtcttagccctttcccctgtaaacaagtcttttcctaattgtttgagtagctgaagcatctcttgtccaaacacggacagagaacatgaaggtgaatcatttcgttcatggctgctgagcaaattctggaaacgcttcttccatgcccttaggcagatggtcggctcacatatatttccacagcacaaatgaatgtaaaacagacgcatgtacatattaattaatgctaatgtattcataagtgattcagataatgggccgtccatcctgacacttcccttctaattcatttaccctaaagaaagcggttcttgcttcattttagactctcataaacgtatctgctgagattttggggattccctctcttccaccctccccatggccacctgctggctatctaagaatctgtccaactggagaacaagtcttctagactgtgatttcgtgtggggagaagcactatctataaacatgcttggctaaggtagtacgaagaggctggatgcatgtctgttcggagacatatcaggaaaacgccgagaattagagcaaagtaacacaagctgagcacaaccaatctgccaatcccaaatcagaaacatgactctgagtcaaactgttatgagcacagacataatgcccagagtggaaactgtgtagttagcatatatgtgacagggtgcagtcagaccacaggccctaaaacatttggtaaaataacttccaggctatgtgaataaggtatttatgaaagcaaaagtaactccttgttcagacatgggtcctacaccccccaccaagatagctcattctgtggatacacatggcttcaagtcagaaacactcatcccactctcttaggataaggcacattcaacttgtatgatagaggggagaagggggcttagaaagggcaaccaggtgtacaaaggtaagaattggaggtttagaaaattgctgagtaaaggtgtgtacatctgaaatagagaccatgttctaaaaatacatttaaaaattaaattagaaacaattttgttttacatgtcaatcccagttccatttccctcccatcctcccctactccccaaccccctatatcccagtccctttctgctccccagggagggtgaggccttccatgggggaatcttcaaagtctgtcacatcatttggagtggggcctaggccctcccctgtgtgtctaggctgatagagtatccctgtatgggaaatgggctcccaaagtccattcatacactatggttaaatacagatccactaccagaggacccatagattgcccaggcctgctaactgacactcacattcagggggtctgggttggccttatgctggtttcttagctatcagtctggagtccatgagctcccccttgttcaggtcagctgttgctgtgggtttctacagcctggtcttgacacctttgctcatcactcctccctctctgtaactggattccaggcattcagctcagtgtttagctatggatctctgcttctgcttccatcagatattggatgaaggctctaggatggcatataaggtagtcatcaatctcattataggggaagggcatttaaggtagcctctccactattgcttagagtgttagttggtgtcatccttgtagatctttggacatttccctagtgccagatttctctttaaacctataatggctccctctatgatggtatctcttttcttgctctcctctattcttcccctgactgaatcttcctgctctctcatgtccccttctccccttctctttctcctaactccctctcccttccccccatgctcccaatttgctcatgagatcttgtccctttccccttctctcgggtaccatgtttgtctctcttatggtcctcctggtttcctggcttctctggagctgtggattgtaggctgttaattctttgctctatgtctaatccacatatgagtgaataaatatcatgttggtctttttgtgactgggttaccttactcaggatggtttcttctagttccatccatttgcctgcaaatttcaatattccattggtttttcccactgagtagtattccattgagtaaatgtaccacattttctttatcagttcttcaagtgaggggcatctaagttgctttcaggttctggttattacaaataatgcttctatgaatatagtcgaacagatgtccttgttgggtgaatgtgcatcctttgggtacatgcttaagaatggaattgctggatcttgtggtagactacttcccaatttcctgaggaacctccatactgattttcaaactgactgtatgagctggcactcccagcagcagtggaggagtgtcccctttctccacatcctctccagcataaactgtcattggggtttttaattttagccattctgacaggagcaagatggtatctcagaggtgttttgatttgtatttccctgatggctaaagatgttcagtactttcttaagtgtcttttagccattttagattcctcattgagagttcgctatttagttctgtaccccaaattttaattggattatttggtgttttggtgactagtttcttgagttcttcgtatattttggaaatcagccctctgtcagatgtagggttggtgaagatcttttcccattctgtgggctgctgttttgtcttgttgactgtgtcctttgtcttacagaagtttctcagtttcaggaagtcccatttattaattgttgatatcagtgtctgtgctactggtgtaatgttcaggaagtggtctcctataccaattagttctagggtacctcccactttctcttctaagaggttcagtgtggatgggtttatgttgaggtctcagattcatttggactcaagttttgtatatggcaatagatttggatctatctgcaatcttctacatgtctacaaccagttatgcctgcaccatttgttgaagatactttcttttatccattgtatagttttagcttctttgccaaagatcaggtgtttgtaggtatgtgggctaatatcagggtgattccattgatctacctgactatttttgtgccaataccaagatgttttcaggagtattgctctataatatagcttgaagtcagggatggtgatgcctctggcaattcctgtgttttacagggctgttttagctatcctgggtcttttgtttttctatataaagttgagtattgttcttccgagatttatgaagaattgtgctggtattttgatggggattgcattgaatctgtaggttgcttttggcaagactgccattttcactatgctgatcctacctatgcaagtattgctgcgattttaatatttaaaaatttttattgttaattcagtgcgtatttgtacatgagtgcagtgtctctggaggccagtagagggtgccagatcccccagagctggagagttatagatgagctgatcagtgagtgtgtatagtgagtatacagaaacaaattgggctcctttgcaatttcagtatgttcacttagctcctgagccatctctccagcccctatcactactattttttaaaatccaggttgcttaaaagcaaggtacaggaccacattgtggaggtgattatttaagagcagcatcagaggacagagtccagagaatcttctgatatctgcctccaagcgttttaccatcacctaagtaaggcagtagcaaacatgggtaactccctccttctctctgacccctagtcctcctcccctcacatacgcctgctggaccttgtgtctgctgggtttgtgggtgttctatgatcctgttattgggatctcttaggaggtaagtggctcaaaagttcttcctggatctgtgtgcttcctccttgcagtcggtttctattctgattatataagattttcaggacgtagagagagaaggaaggagggagaggatagggagagggagggagggaggagatcacaagcctaaccaatgcataaaaaataattaatgcagggagtgaagaagaacttggtgtggatctggctagaagccaaggggatgagtcaatgagaggagaaagccaacagttggctgtgctgggcagtgctcgagattttgtcagaggcacgtgttagaaaccgaatttgcatccagatatgcttctgcttcagtgagtcaagctgcccagagaaaatggctgctggggccggatcctccaagatggacccaacatccctggtctgctggtattgttgtccttggggagaactcccttgtgtatgtagaatgtgataaccttttagatgttgcttctgaaattgggtgattaaaacaaaacaaaacaaaacaaaatcactgttctccctcttggacaccctcactcggggggaagctgcccatctggcaaagcatgcatggtttcttgcccctgtggttggcacacagtcacacgagaaagctaggaagcagctctttcccctggtgaatcctgcaatgcttgcaggctgcctgtcacatgcttgcaggtgagcagggctatctagctaggcctcccttggatttctaacaccaactacaaggtaacagatactgagttttgagatagtttgctatctagcagtaaagaatggatactgttgttctttgtcgtggcttcatggtttattttctgcttgtaaaacttaaatatgcccattgttaagacagaaaaacaaagaaataaaaaaaacccaaaatctgtaaacaagagtttagtagtatttcccacagactagatggcatgagctatttgaaatgccaagtagactatgatattcgcttgttcaaccagccaatcacgtcctgtttcatttggaatatcagccagaattcttgctgtgacctcccaggctgaggatctcccctttgcccacaggatgctactctcccccccccagcccctgctgcttaccaagtctgacccacacagaacaacctcatgttggcttctttgctacattcatctctcagctgtggcttctgttgtctctatgcaaatgttgctccacagagatgcctccttggaacttccacccaaacagtgtcctccattagctctgcgcctcagggatgccacactattgctagtttacaatgtcactcatggcctgcttcagtcttctcccattagagtgctggctttacaaatgcaacgattttgtttaatttactcctttatccccagtgcaataaacatatgttgaataaatgctggaactattccttttatccctctcagttcttgattctttcttccacacgggtttttaaaatttcaaagatattgtaattttataagaagaaaataagactcaactttaaaaggtcaaaactaagctggtgagatggctcagtgggtagaggaacctgccatcgagttctatgacctgaatttgattcccctaggacacacatggtggaaggagagagccagttcctgcaagttgtcctttgaccaactcatgtgcactatgacatgtgccatccccattcacacagtaaataaaacaaacaaacaaacaaacaaacaaacataggtttcaataaagacacgaacgcctggtgttagtggcgcacacctttaatcccagcactcgggaggcagagtgggctcgaggccagcatggtctaccgagcaagttccaggacaggctccagaacaatacagagaaaccccctctcgaatcccccaccctcccaaaagaaaattaaagacacaaactgtgaagtcttcagactttgaaaattctgttgttgtttggtgttttggagctggggtctcactcaagctggcctaagtctcccttcttgtgagtgctgggattgcaggtgtgtatcaccacactcaatttttagattctgtataaaactttatcacgtcaatgtgcctctagaatggtgggacagctgggctttctgtttctttctcctcatcctgaatgtggagaaacttccaagatattccagtaagtaatgatcagaggagtgaaacattgttaaaggagatcctgaggggatgtgtggtgcaaaaaggcacgcacctggaaaagctcttgactcgtctcatctgcctgcttcatttgagtcctcaggttgccctcattgctatgtgcttttatttgtgaggcgctcttaccttttttccaatgtatggacatctatgtcttctgctcgttgagatgcaaacatctcatccctattcagttactttttcctgaggaaaattgatatatttgaagatgggacatggtatggaaaagtcaacggaacagcttgcccagtgttctccagggatagagtcgagataatctggaaaagcatcagagaagaggtcctccaacactggtgtgtgcattctctaatgtcatgatccacagaaacattttgactggcttctgactgttagatcattggttcctgagcttcttcagtgtgaatcttgatgtcccgaacatactgatttttaaatgtcatttgtatatgtttttaatattttttgtgtgtatgtgtgcatggatgttttacctgcatgcatgttgatgcaccatgcgcatgtagtgcccccagaggccagaaaagagtgttggattcccccttggaaagggagtcccagaagatagttggccattgtgtggttgctgggaattggcacctggggcttctagaggaggagtcagtactcttaacctcagagccagctcttcagaccctgaacacatcttcgtatgtctttcagacctctatttctccagaaagatacattagtaacatttttagagaaacagacggcacgttcaaatggagcaataggcgtctgggctgcattaagagagacagtgaagcaagtgatgaagcagctgggactgagagcatgcagaagggaggctgtggtagccgcaggactcgcgtccaaatagaagcctggagaattcaggtgctttcaaatgtgtcttctcctgggggagccagggtgcattacctctggctccttttcccctcacccagtcagtgttttccatgggtccaatttgagaggttggtcaggagcccacagagcccataatgcagggagaaggaagggtgcacaccagatttggagggtaccccaagagaagaatgtgtagaagtgtcaggtttttggtcaaagggtgtgaacaggcttaaaatgtttaaatttgggagctgggggagaaggctcactgagtaaatgtacttactgcaaaccatatggtggaaggagagaattgactcccacagtttgtgctctgagttttactctgaggttagtggtatgtgacttacacccccaaaatgtaagcactcattttttcaaaaagagttatttatttatttatttttgtgcatgtatgtccgtttgagttgcagacaattgtgagatgccttgtgggtgctgggaattgaacctgggtcctctggaagagcagccagtgctcttaaccgctgagccatctctctgtccccccactcccaaaatttaaaaatactgtttaaaacatattttaatatctatgctaggagatacttcatgtccaccaaaattgttttctccaccctatggcactcaaaatagaccccatgatggccaaaacaacagacccctctctgttgttttgtgaccagtacctttgcccactgaatcttgaagatactatgctatattgaagtaaaccagacaaaatggaacaaataccaatacactgtcactaatatggattacctacagtgatcaaaagcatagacaggggaagtatagtggaacttagcagggtcctggaggaagggcagatgggaagttactatttagtaagtgtggggttttagtttgggttttgaagacttctgtggatgatggtgatgctgtttgaacagtccccatttatccatgatctacacgggagtatttgttctagttccaactctttggattcttgagtagatgaactgggttgacaggtagatagaggactggtttttctaagtcaaaagatgctggatgtggggctggagagatggctcggtattaaagagcacttacttcttttgcacaggccctaagttttgtttctagcactgacatcatgtggctcatagctgcctgcaactctaggtccatgggatgccgcaccttcttttggccccctgaaaatatgcacatatgtacacacacatggacataaaaatacatcttctgggctttgagatgggattagtgcttgtggggaaagatttggaagtctctccaaattttctcttttacaaatattttattagttctgagaattttgtatgtgctcactacttatccaattgtataatcttaaaaaaatctcatggaagttcagtttgtgcttctcagatattctgggatgtgttgctttccactggacttcaatttactagggtctacactcttaaagaaaatggacttctgctctcctagtagctacaaattgccaattgctccctggttatgggttatgcataacttcccttccaatgctgggaattggtctggcttgagcttgcacaggtattgtgtatctattacaaccactgtgaattcatcatatacattgtcccgacctgcaggacatcaacctggggcaagagagtcagggatagggaatggggacaagagatgcagaaagaaccaccacaagacaggattctgatcaagtggcaaactttattatttttctcaggctagcgtatatagtcagcagagcaggacatgagaggggtagaatgggctgtttgtgcaccaggtgttagtgtaggtaggatattaggaaaccacaaagagaggatgtttggcagggtaaagagttcatgagtaagaggtccaggaagggttgcctaggtgactgagcctgtgggtggaggactgagttaagttgtttcttttcttgagctgaggttttaaggagctgctatgtaaacgttaatatataactatgtggctggccaagcatggcctaggatctcatgctgagccctgagatctttggttcccaacacatataactgctctgttgtatctaagacactgtattcctgtagtcatccactgccctctggctcttacattctttccaccccttcttccacaatgatccatgagctttgagaggggtggttgtgttatagatgttccttttatggcatcccacagaatgggttagttcttttggagttggtcagtgaggttctgtagacccccacccacattacaagctattgcccatattcttggttatcatctagaacttaacactaatatccctgttgctgaagacaccatgtacttgaatcatacaacacagagcactcaaactgaaactgacctggaagcttcagtcctattggctgatttcatagttctaaagggtactatgcaaaatactaggggagaaatgtaatcaccaatcttacccagctgtggaccctgtgaaggacaataatgactagtctggcaggcatgccctctagtacagtagtggcatggcactcatgggagtagccaactactttctgattatatttaagtccttttccacaagcctaaaacccagaaatatctcattattaggctgagaacctatggatagtcaggggagaacctactgctattatgcagctaagatgcaggattagaacaactcctaatgagttgctatgcccatagataaatgcatctctcaactcttatcaaggaagcttctatttgcagtagattacacatagtagttaatacagagacccataactgaccaaggtgatgtgaataagagaccgagggatactctccaactgttctatggaaaagggcaagtgtgttttacataagggaataaggatacaaggactatttagtaatcagaagagtaggttatgatgtgttcagcagcgcttgcttttattcacaatgcacacagctagactacattccccagctcctcaaagctaacagtggctaagagatggagacatagacaaaagtggtgaggtgacttctaggcagatctcatgcattcctttcacaggacaacattttaatccagaattaagggagagacacaggatctgagagaaactcaggggtcacttggggcgagccacaccatcatgaaatggagagggtttggttccctgaattatacctgaaggaagggtaccaatcaggaacaatctgtgcaaactgatagaagcaagaacaatgtctgccatgataagccaccgggagctgtagttgcctctcttgatatgctattgtattatataaaatatgtgctgattgtagatgatttgataaattctgaaagcaaagtgaagggggaaactgtttttctaccacccagagataacagcttttactattgtagtggtttttttttcacttccacttatttttgcataagagctccataggccatacgatgatgataataggaagagagtttggtgatagaaaatgttttacaatcaaaatctctaattgctcaggtcattcatgatgtacttcacagtgcctttcttcttttctctttctttctttttttaaagctgaatctcatgctatagtccagactggcctcacactttctgtgatcttcccacatctgtctctgaggccctgggattacaggtatatagcatgatgcctgtctctgtgtttgtttgtttgtttgcctgattgcccatgctggggagcaaaattggggtcttgagcatgttagacaaccatgctaaccagtgagctatacccccaactctcaatatgtatattttaatatatatcattttaaaagtataaattcttgggcaagagagatggtttagtgattagctacacgtacttctcatactctgtttttggtttccagcatccaattgtgagtggctcacaatcatataactccagctagaggggatctgacacctctggctgccaaaagaagctgaactcacatgtgcaacccccaatacacataattaaaaatgataaaagcctacacataaattctatctagttgagattattaacattagcaataaaatagactttaagataattttctaatcctattaatgttcacaaatcttgtgaagcaaggaattatctattattttaatcctcacttcataatacaacatttaacaaacagaaaagtgtaaggagcacccactgactaaattgttctctgaataaatggatgggtgaattcagtagataaatctacctaagtgcaacaggtagagaggttttaatcaactatcgaagccatgactgaaacctgtaactagttccatcattttggagggtctcaagtatgtctgaaacctgtaaatagtcccattattatggaggatcgggatggcagcaattgtttaaagcacagatcaaatatgcaaatatatgtcatttcagagcaaagggaagaacatgacttaaagacacattccttctccttggaaaagaacagaaacagaaatgaagaaataccaagcacgaagggctggatacagggccaaacatttgccccacattgtagcattcacctgagatcaacacagtccaatgggcccttaggtttgtatgccaaatgagaaagtatgatcttcaagcctatatataacttgaattctccattctagaattcctattataaatttagtttttcattaactagaatgcagactcatttattttttttcaatggagggtgcttagtaatctgaaaatattttctctataaagaaatggaccatttgggaaagaattcctaaaacaccacttttggaaaagaacagaatttacttccatgagtttttacacagactatttcggtgcaatgcagggtcaacctgattgctagccttttgttttgatggttcctgtttttaattttccctatgcttacaggattttctttctttgcatttttaattcaaaaaggttgccagttgcctaagcctgggtttgctggttttcatcaaatgtcatgccgagagctcttttaatttactcactgtgtctctctcaactgaggtgggttcatgcagttatcttaattaaaggttacttgtgtgagactgcctcaccccagtgacctccttaattcagaaactgtgtcttagtcatgttagtatctttagcacatggcaaacatacaatggtgggaccttgacaatgaattaaaactctgtagtgaaaggaagtctgtctagagattattttattgcattgattttctacttctatttcattctgtaaggctgcatgtgtgtcccagctaaatgtattgcttcaaccactgcaactgcagttgatttgattcagccgataggacagtagagtgacaccatggaagcagaagagaaattgctcattgagacttgctcttcctaagtcttgggaaggctgggatggtcacaggtagatctgctagcctaaaagatgatgcaagacaccctgagcaatgataagccacttcaaattagacacaccccttctcttgaaaccagacaccttagactatctaggtccagtaaaatgggccacttctaaagcactccctaacgaggcacaaatgatgagaaacagttgcttcaggccagtaagtggaggtgatttgttacggagcaagtgctaattgtcacagaaagccagcagttattctaatttagaaggcagttaactaacatttttaaaaaagatttttatattgtttctgggagacgacagagtgatatctcttaattttaagtaacaatgtacttagccattgttataatggctaacaaataataaaacataagggaaaaatataagcattttgcaatatggaaaagctcaggatattttaccttccaggtataatttctgaggaattaatgaaaatcccaaaattctgaagcagtccccctccaagcaaagaaagagaaacagacacacaaaaataaactgtaaaaatgatggatacaatctatttctttatctgttgctatattaaaatactctagtgagctgggcagaagaggcagaggcagaggcagggcaggcagatttctgagttcgaggctagcctgatctacagaatgagttccaagacatccaggcttacacagaaaaaacatgtcttgaaaacagccaaaaaacaaaaaaacaaaaaaaacaaaaaaacaaaacaaacaactccacccctctactacaacaaacaatgaaagcaacttgaggtagaaggtttatttagctcacagctctacattagtgtccctcatagtgtggaaatcaaggcatcaggagtgacacgatttgttccattatttctgtatttagaagaaaagaataatgaatgtgtgcctgctagtgttcagcttactttcttcactcttctacaatttatcccagcgtcccttgtttagggaaggtgccaccacagtgggtgggtaatcagtgtgaccaagataattccccacaggaatgctcagatacccactgaccaggtagttctagatttttgtcaaattgacagttaaatctaaccatcgcataatctaaatctgttccagattgttaaaataagattccatcttaattacatgcatctgtgtgtaggtatttgaatgtgaatacaggtgcctgtggagaccagaagagggtgccagattccctgatgctggagttacaggcgattgtgaactgcaacacaggtcctgggaaccaaattcaggtgctccaaaaagtcagttcttgcttttaagcacagaaccatctcttcagccctgcttgagatatattctttgatggtactcagtttcatactgatcttctattcatgtcttttacttctgggacttgaagcctcaagtcacctttctgagactttacaaccagctggattctgacttggttcacacaatgagaggattgtgaataaaactagaagtaggtagggggtaaataacctgatctagcagtggcttcagtagctttagcacaactgaggagccacagtggcaggacttcccattgtatctgtggtaataactcttcctacaacatctgggtaaatggaaactaatggcttcccgtcagaaaagaggagttggcgttcaggaggtcctacaagagttgaagtggttctctgaatgtattgtccctgggtcataccatctagttatcctttgctcattaggaccttctgatacattgcaatgaatgacttgaattgaatcactccctgctttaatttcctagagtgctttctgttttcttggatgatgaaatggaatcatgggctgagaaatgtttcaataggccttgaaagccattggtctactctgcatggaaagtcaatgagttccaagaacatcttccaggggaagaatggagcaattcctaagtagtaggaaggggagacttgggaatatgataaggaatcacacagttcttctctgagaaagaaactatgactatactgccatggaaacgtcaaaagatacaggactaacagtcaaaatatgaagtaaactaaactgtggcatgaggtggagttcttgatgaagtgccggagattacacttgacctagattctagacccgttttcctttgtatggtatagtaatcatttctttgagacatacctgggaaacaaatgtaaccctagcatacttggttctgcatgagcaaatcagcaacttgttcatttcatctctgatagccaattaattaaaagtaagagaaacctctcttcaatgaccatttcagaatgcaatgcaaatatggagctgagaagaggagttgagagctgaaggacggggtgactctgagtagagcattctcatttaaacccgataacctgagatcagtctctgagacccacatggtggaaggaaagaaccagctcatgtgagtacctctgatcgtcacatgtgtgccgtggcttactcttcagaaataataaaataaaatagcttaagaaaaagtatacatacaggaaataaaataacaaaatctgtagaagaaaaataggtatctgaagtaaaaaaaaattcttaatttcctcattgatggctcagagaatacttactcaaatcaaaacagcctttgctatttatagattgcccttatatagcattttcatgttcagacactactttgataaaaggagtttttcaaaggatatactgcattagggaacaaaggtagcctgatagtgttccaacgtaaaaacctcacaggccaacttcctcatctctgcaggaggaattacttggattagataatttgaggtctctgctgtagaatgctgattgtctgtgaaggagagcatgtgtctctcggtctctgttcctccctcggatcacactctgggagagccgttcaaattgccaagttttaatcgtggccaggtaagaagatcatatacttaacatgagggaatatgtgtggaagacttctgggaaaactgggctctggagttggcaatttgtcaaatcagaagaaatccatgtaagtgtgataactcacgccatgtcattagagaaaggcagagcccaagctcatggtttcaaaagagcaagtgcacattctgacatcatatcaaaacaaaacatcgtctcttcagaggagtttttcctcttgaagttcacagtaatatgaggaagtattttctacctctaaaaaatgcctgggcagaggtgctaaaattgatttttgtattttgttaaatataatggggggctctataataccccagaaagggctgatggccgtagcccaataacttttcattttttacctaggtttgttagaaacaaaatttcctcccaaattaaaatctgcactctatgatttttttcatgccctcttagagattattttggtagaggcttgccaagttatctggagtcacccagctggttggtgtggcagcttagtcccttcactgaatcctgcagacacaggacctatttccctttcttccatctgccaaattcactttgaaaatggagggtaaccatccctttcagaatgaaagccacaccctcttcaatctataggttgccattatgtcccattacatatgctaatcctttttgccaccataggcccttgtatgatgcatcaaggacgcaggattcaaaatatctgaaagcattttgtgtccacctagatgcaggcagcttgggccagacagcatttgcagaccagatgggctatggaaggggctgcttgcattcctttttctgcaactccaaaactacaagcatcttagtaattttttttttttttttacttaaaatagggtgggtagctttacctattgtcctgtccttctaaaaatgggcagttttgtttctacaaggggttcttattactatagtcttgtttgctttccactctgagaaatgatttctttctgtgctgagaaaattgatttcaggacacgtcaccctctttataaattcacacgtgtttatgtacctatctgtgggatgttgctatgaaaattcaagacagcagcctttgtgttagtcttctaggactaactggacttctaggttctgcatgtctcatgcaagccgtccttttcaatactatccttattttgttttctaagtacctctgctcaatggtttcttggacctggtttggtttttatttgcccacacagaacaagcttagttggttaacgttgggcattcctttgccagcaaatcttgcttagatgtcctatctgctgcttggtattggcttgtttttgtttttttacaagatggctaacatagaaaatgatgttattagctttgcagataaacgctataggaataatgtaagcaacaaaaattcactctccttggttgtcagtgatcgcaaagcctactgaagcttcctgatctaccccttctctgttcacaacacaattcacttcttcctcccttccacagcacttctgctattgtttcagctccttatccagttgccaccagcatcaatgggttggttgtctctgtttaatgatcagacattcagttgacatctcagtgtcctcagtaggtgacctgcacaaatagcaacatctgacaatgacagcattgctgacatcttcagctagagatacagccttaaacaatgtttgatgctgataaaatttacagttctcacatgatgtaaatcagtcattgccttccccacccacggatttcacaatgccgggtggagccttcctttggcttagaaggaatggctggggaattaacaggaaggcctcacccaatcaggtgttaaactatttcagaactttactcagttctacttcaagaactgtgttgcagaaagggcgaacaccaaggtttccctctataaagcactatacgcctctttctcttagcatcatagggtgctatcagcagacagcacttgggatttcccaccctttgacaggagagcaagctacatagacagacaaggagttttgcctcaccacagcagttctgtggagctgtgtaacagtggaaactgtatgaactgacatgtccactccttggtatgggtagggagtgtggatatctatatatctatatctagatatagatatagatatgagagagagagagagagaaagagagagtgagagagaatggcatctgaaagagtccagagcagaaagagaaagtagacggaacatggtcagcagactggacctgaccatgagcagagcagagagagaaagggggtgggacatagagagagagggagagaagcagaaaaacagaataagaataagaataagaggaagaggaagaggaagaggaagaggaagagaagaagaagaagaagaagaagaagaagaagaagaagaagaagaagaagaagaagaagaagaagaaatgtgtagctgggggcgggggaggaagcccctgagctggagggagcttgaggctagggaggaggtgaggagggctaggtgctagcatagattttgaaatgtgtaacaggtgtttgtgatactgagggagcctggaggcagcatgcacttcagtatgctgacaggccccacagacagccatttgtctggtgatgagggaattgactcttgggagaagggaagagcttaacaaatggaatgtaggcttttatgtaaccaccagaaatctttctatagctcaggttgagcccatttctggatatttggactgccttttggagtttggggaaccgaaggttcctttgggcctaacagaaactgtctctcttggcaagaggagagaagcagctgaggtccaaggaataaatagaactcaatagtggtgggaagctgaagttaacaagatccacaaggcccctccccaaggttacagaagcagaaatcagagtgaggttggcaggcggagtctgccatgttgtggggtaagtcctcactctctcaggcatgcaacatagggtttccacctattggaatcatgcaccttcccagggatagactcaacctgaacaatctggttgcaatatataaaaccagagtgtagtatataaaaccctaattaacttgtatttatctttggtactgaaataccttttatggcatgtgtccttcctgtcagttggtcccaggaagtgatggctgaagataaaatttaaaaaaagaagagtcaggttactttaacaccaaattaatgtaatgtctttatctcattcaggagtatgccagtaaaatctcgacattaaaggttgatcaaataagatgcctctctcctgttgaatctgttcaggcaatccaaaatctgcctttgtaaatcctctggtctgtgcctccattccagaatctctcctcttgactgatattttccaggatgtgatttttgtctttattcttcccatggtttagtcttcctggcttggagacatcctaagcctaaggtgcctttatgtgtactaggattggtccatcagtgtggactttgtactctgtcctttacaatttctgtacttccaaattcgtgaggcataactcattattgtgaactctaccttcaaatacagctactaacaacaggctccacaagtagaaatgtgttctctgtgatacgattgatggctgcaggagagatacttacgggaaacaatatcccagaacagtaatatacactttaatgtagactttataagccttcatgatttctatcacttttgctatggcaatttactagtgggatgttttcgccagcattttgggaaccaagcaatgagacaccagaatgaagctggattgagactgctccatgggaactgaagcagaaaaacatacgacgataccctatgcagtgaaaaagggatgtcactaccccctccttctgatgaagccaagcactccatatttgttcccttagtgattagatcattttgtaccatatgtcatttcttggtcatccttcccatctgattacattccaagaatataatgaagagtgagagcttgtttgtggggtaaatggtgtttgtaaacaaaagaaaaagcaagcacagggatgtctcatttcgagtgccaccatcaccaacatttagggtgttctcccaatacctgagaagcatttatttccaagtcatcccatagacattctctaagaatgtcactgttgctttatggcagaaagagtgacggaagcatatgcaacttttggcatggagatgcttttgcctgagtgagagtcaaatggagatcagatgatccagtgaacagacaggtagggtgggaacaaggggggatggcagttggagactgggctgtattcactcttcatagcctcttctctatttaagaatgtgcacaccgattagcactttccatgaggccacttcctaccagattttacgaaaccacagactggacacttttcttctttgtgcctcagtttacctctctaaagatgttaagatgttccacgttatatttagagatctgaacattcagatcctttctcttccataagcagagttccaacacacagtccccagactcattcccacccactcctcaggaagtcgagtccagccctgtcactcaagaatggttttggctgcaagtaacaggaaccttgaggaacactgatgcaaatgtagaaatgtcagtttttcttgcatactatgaattctaaggagaggcatatgcaggcttctggagttcagtggcttggtgtgtcagcctgccgcctcaggcttcttatctgctccattttggcagagatctggctaccacagctccaggcaagcatagggagggatgctatgaaagaacgaggagcctaaggcaacacagttctgtgtgccccctcttcacattagctaaagctctctcccagcctcactattagactcagacttagcgcccattggttagaatcatgtcctgtgatcaagcctaggttcacctaaactggaccccttaagagcttagtcactattgtagtgatgtccagaatgctagtgaagtccacatggctgcacagaaggcaaggctgttttgttttaaggttaagcaaagtcatattgtccaattgttttgtactgttatgtgaaaattttcagtggaaaatcatctttcaaaatggggacttgggccaaggaggggaaacagactgttcacagtctccaactctgtcagttctgttgtctgactctcaactttcagttcaagagataatgctcagtttattgcccgtttagcccaaagtcccaagtcccttcctaggcaaacactcttgtcctgaggaagacaacatcagcccacagacaatgctggacaccagacagagctgggggaatcatcctccagagtggttgtgtggattgctgtgtggcactgtgggattctactccacagagttcagctttcctgaggaggccagccagggagggggaagaaggattttagtaacctctccacagtgtctactgcattttcctttatccttcccatctatcccttcccatgattctctgcattgttgttggcctttatgagcttaaataaggagcccaaaccacagaacagagccatagaaccaaatctccaaaggctgaaggtggcacagttatcagaggagattgctttgggttctgggccatggagcagcatttggaaggagcatgagagcagggttgcattctctatgccactttgaggccacctagagagaaagctgaggtgtcatcatttcatggaatgctaaccggcagtaaaagaaatatgctacagctgtacacaaatggactagttagtaatttggaagctacaaagcaagattcagaagacaactagcctgcaatgcccttatagacctttttgttcaactgaaaacctaacaaatttgaatatgtttcatgtatatgggtgtgtgtgtgtgtgtgtgtgtgtgtgtgtgtgtgtgtgtgtgtgtgtgtgtgagactaattcttatcagtgataaaacaaagtaaatgctgagattggggcatgttaattttgaagggagttaaggaggctggaccaggaaggagagtgctgggaattacctttggagatctgcccaagagcaccacagactcagtggcttatgtaacagagctttcttgtctcagtttggagggctgtgggctctaattcaagattggtttctagccgggcatttgtggtgcacgcctttaatcccagcacttgggaggcagagttcgaggccagcctggtctccagagcgagtgccaggataggcaaagctacacagagaaaccctgtctcgaaaaaccataaaaaaaacaaacaaatccaaaaacaaaaaacaaaaaatcccaaaaagattggttcctatgaggctatcagaagggccagctcttggttttctttgtgtctttttatctcatcttttgtctatgtttgactacctttatgtgcattcctatgaggctatgtcagaccctgtggtggtttgaatgagaatggccctcataggctcatatgtttcattgcttggtccctggttggtggaactgtttgggaaaggattaggaggtgtggccttgttgaagggcacgtgtttgtaggggtgggcttttatgtttccaaagttcatagcagacccagtctcacaagctttctctactctgcttgtggagcagatgtaaacattcagctactgctccaagcaccatgcttgcctgctgccatatggccttcttgccacaatggccatgggctcactctctgaaagccctcaattgctttcttatttatttatttatttatttatttatttatttatttattttggtttttcgagacagggtttctctgtggctttggagactgtcctgggactagctcttgtagaccagtgtagaccaggctggttttgaactcacagagatctgcctgcctctgcctcccaagtgctgggattaaaagcatgcaccaccgcctggttaaacgctttttaaaataatttgccttggtcatggtgtctcttcacagtcacagaaaagcaactaagatagaccctgagacaattactaggttttgacacaccctaaagattagatcttaccttaacttaccttaattttatttataatgatctgacttttaggtagggtcatatactgagggactggatgttaagacaacaacacataaattttaggaggcacaattcaaactataacactaatgttgaattataattctgcattggcataaagggttatagacactcattgttgtattactataaaagaggactgtacttgggctaatgctaatctccaactaagaagtaacccagtctgtggaatggagttctacatgaaaaagtaaaaaacaaaaaatcccctgttcaaatggactctagtctcagtgcatctgttggagtggaggtggaatcaagtctgagctggggctctgaatccgggtgcctgaataaatattgatgagcagtagtctttaacggaacaatttctttttggcttggtgagcaaggaaataatttgcgtaagtagacttcaaggcagagctggtttgctatatagagagagcttattctgtctgaccagggaggaaatagtaaaaaattgttcaaattatcttaatgtctcttctgggaaaggttgtacacagggaaaaaaatctctggctgtagagaccattcacagtcactaattcatgaagtgtctcagctaagattcagtttcttcatacatagaatgggaatgtgaaatttcacaaattctcaggtatgctgtttgacgtgtatgccaattttggttaaaaaaaaaccctactaaattaatagaagcatagctttaaaacctgatataatttttcagttcaaattttccattggtgtgggggatggtgatcagtcatctctgttcagctttctcaaagacaataaattgtcccctggactttccaatgggagcaattctccatttagaatgagacaacaaagatacttgcatacttttctgagcaaggagaaatcccatttagttttggggaagagtgatgattatagagcgagtagcggagcatgtcccctgttgtctattccagaagaacacacttcactcactggagagaggggagactaaaaatatgccagcaacatctacattggaaatgtttgcacccacttagtaatttctgaatcttccaacaagagccattcctttaagcccatgagatccattcccttaagtccatgagatgtccctcctttttatgctgaaatttctgtttggccctgataactcaatcaacttgagctaactacccaccagttcttttcttttcttgtctgtagaattcttttttttaaatttaaattagaaacaatcttgttttatatgtcaatcccagttccctctcccttgccagctcccctgcccccccaaaacacccataccatttctgctccccagggagagtgaggccttccatggggagggtcttcagagtctgtcatatcctttgggatagggcctaggccctccccagtgtgtctaggctgagggagtatccctctatgtgaaatgggatcccaaagtccattcctatgctagggataaatactgatctactacaagaggccccatatatttccgaggcctcttcactgacacccacatttatggggtctggatcagttccatgctggtttcccagtgatcagtctggggtcaagagcacccccttgttcaggccagctgtttctgtgagtttcactagcatggtcttgaccactttgctcatcactcctccttctctgcaactggattccaattcagttcagtttttagctgtgggtatctgcttctacttccatcagctgctggatgaaggctctggggaggtatataagttagtcatcaatcttgttatcaggggagggcatttaaggtagcctctccactgttgcttagatggttagttggtatcatccttgtagatctctggacatttccctagtgcctgatttcctttaaacctatactggctccctctttgatagtatctcttattttgctctcctctgttcttcccctacacaaccttcctgctcccttatgccctcttctcccctcctcttcttctcttctcattattctagtttcctctaccctctccccatcctcccaatttgctcaggagatcttgtccctttctccttctttgggggaccatgtatgtctcttttacagtcctccttgtagcctagcttctcaggaggtatggattataggctggtaatcttttgctctatatgtaaaatccatatatgagcgagtgcataccatgtttgtcttttgggggctgggttacatcgctcagaatggtttcttctagtccatccatttgcttgagaatttcaatattccattgtttttttccactgagaggtactaaattgtgtaaatgtaccacatttttctgtatccattcttcagttgaagggcatctagtttacttgcaggttctggctattacaaatagtgctgctatgaacatagttgaacagatgtccttgttttatgaatatgcttcttttgggtatatgcctaagagtggaaatgctggatcttgtagtaggctgattcccattttcctgaggaatcaccatactgatttccaaagtggatgtacaagttggcactcccaccagaagtggaggagtgctcccctttctccacatcctctccagcataagttatcattggtggttttgattttagccattctgacaggagtaagatgatatcccagagttcttttgatttacatttttctgatggctaaggatgttgagcactttcttatgtgtctttcagccattttagattcctctgttgagaattctctatttagttctgttgcctactttttaattgtattattaggtgttttggagactagcttcttgagttctttgtaaattttggagatcagccctcggtcggatatggggttggtgaatatcttttcccaatcagttttgtctggttgactgtgtcctttgccttacagaagcttctcagtttcaggaggtcccatttattaattgtggatctcagtgtctgtgctacaggtataatgttcaggaagtggtctcctataccaattcattcaagggtatttcccactttctcttctaagaatttcagtgtggctggatttatgttgagttctttgatccatttggacttaaattttgtgcatggcgatagacatggatctatctgcagtcttctgcatgccagcatccagttatgccagcaccatttgttgaagattctttctttatttcattgtatatctttagcttctttgtcaaaaatcatgtgttcgtaggtatgtgggttagtatcaaggttttcaattcaattccattggtctaccagtctattcttgttccagtaccaacctgctttcaggactatagctctatagcagagcttgaagtcagggatggtgatgcctccagaagttcctttgcctactgtacagggttgttcttgtctatcctgggtcttttgtttctccatataaagtattgttatttcaaggtctgtgaagaattgtgttgggattttgatggggattgcattgaatctgtagattgcttttggcaagtttgccaattttactatgttgatcctatctatccaagagcatgggagatctttccattttctggtgtcttctttaatttctttctttaaagactcaaagttcttgctatataggtctttcacttgtttggttagtgttatcccaagatattttatgttgttgtggctattgtaaagtgtgatgtttctctgatttctttctcatccctcttattgtctgtatataataagggctactgatttttttttgagttaatcttgtgtcctgccactttgcttaatatgtttaccagttgtaggagttccctggtagagttttttcaggtcacttatgtaaactatcatatcatttgcaaacagtgaaagtttgacttattcctttcctatttgtatccccttgatctccttttgttgtcttattgctctagctaacacttcaagtacaatattgaagaggtatggaaagagtggacagtcttgccttgttcctgattttagaggaatcaccttgagtctctctccatttagtttgatgttggctgttggtttactgtctgttgcttttattatgttcaggtgtgttcctgttatccctggtctctccaggacctttattatgaaggggtgctggattttgtcaaaggctttttctgcgtccagtgagatgatcatgaggtttttctttttcagtttgtttatatcgtggattaaattgatggattttcatatgttgaacaaacctttccccccagggatgaagcctacttgatcctggtggatgatttttctgatatgttcttggattcggtttgccagtattttattgaatatttttgcgtcaatgttcttgagtgatattggtatgttctctttcttagttgtgtttttgtgtggcttgggtaccaaggtatttgtagccccataaaaagagtttggcaatgaaccttctgcttctattgtgtggaacaatttgaggagtattggtattagctcttcttgaatgtctggtagaattttgcactgaagccatctgaccctgggctttttttggttgggagacttttgatgactgcctctatttccttaggggatataggtctgtttaaattgcttatctgttcttgattcaattttggtaagtgatatctgtccagaaaattgtccatttcattcaaattttccaattttgtggagtacaggtttacaaagtatgagctgaagattccctggatatcctcagtgtctgttattatgtcccccttttcatttctgattttgttaatttgcatgttctctctctgccttttggttagtttggataaaggtttgtctatcttgttgatttttctgtaagaactaactctttgttacattgattctttgaattgttttctttgtttcaactttattgatttctgccctcagtttgattatttcctggtgtctactcctccagggtgaatttgcttccatttgttctagagctttcagttgtgatgtcaactctctgttgtgactattctctagtttcttcatgtgagaacttagagctatgaaatttccttttagtacttctttcaaagtgtcctatatgtttggctattttgtgtcttcagtttcattgaattctaggaagtgtttaatttctttctttatttcttcattgacccaggagtcatgaaattgtgcattgttcagtttccacgagttggtaggtttcctgtaatttgtgttgttcttgaattgtaactataaagcatggtggtcttacaagacacaggtggttattccaagttttttgtacctgttgattttgttatattgccaagtatgtggtcgattttagagaaggttccatgtggtgctgaaaagaaggcatattcttttgtgtttggatggaaagttctatagatgtctgttaatcccaattgtgtcataacttctgttagttcctttgtctctttgttaagttaatgtctggtggtcctaatcagtggtgagagtagggtgttgaaatctcccactataacttcgtgaggtctcatttgtgaactgagttttaatattgtttcttttacaatcattgaacattggtgcctttttatttggggcatagatgtttagaattgagacttcttcctgatggatttttcctgtgatgaatatgaaatgcccttcttcatctcttttgattgattttagtttgaaatctaagtttttggatactaggatagctaccggagctcgtttctggggtccatttgattggagtatcttatcccaaccctttactctgaggtaatgtctgtctttgaattccagatgtgtttcttgtatgcagcaaaagaatggattctgtctttgtatccactctgttagcctgtgtctttttataggcaagttaataccattaatattgagggaaattaaggaccattgagtgcttattctcgtttcttttttgatttgttgttggtagtggtattgtgtgtggatttaccctgttttttcttttggcttttggtaaagtgggattatctattgcctatgtttttatgagtgtagttaatttccttaggttggagttttccttccagtactttctgtagggctggattagtggttacatattgtttgaatctggttttgttatggaataacttgttttctccatttatggtgatagaaaactttgctggttatagtagtctgggctggcatccatgttctcttagagttggtagaatatctatccaggtccttctgactttcagtatttccatggagaagtccagtgttattctaataggtttgactttatgtgtcacttggcctttttcctttctgctcttaatatttttctttattctgtatgtttgatgttttaattattatgtgatgaggggacttttttgtggtccaatctatttggtattctgtaggcttcttgtactttcattggtatgtctttctttaggttgggaaagttttcttctatgattttgttgaatatgttttctgcacctttgatttgggtttcttcaccttcttctatacctattatccttaggtttggtcttttcatggtgtcccatacttcctggatattttgttttaaggatttgttgaacttaagattttcttttcttgaggaatttatttcctgtactttatcctcatgtcttgtattctgttggttttacttgcatttgtagttcctgattgtttactcagcttttctatttccagctttccctcactttgtgttttctttctatttcaattttcagatcttgaactgtttccttcagctgttaaatagtatttccttggctttccttgatttcttgcatcttttggtttgtcttttcttacatttctctggaggattttctcattttctcttttaggatctctatcatttgcatgaagttgtttttaagtttgctgtcttctgcttcatctgtgttgggatgttcagatcttgctggtttagagtccctagactctagtcggcatattggtttttctgttgttgtttgtgttcttatattgtcgtcttcccatctcttctttcaatgggtgtaggtggtgtctcttcctttcttggtgtgtaggggtccaaggttctcttccggtgggttcaagagtgtctgatactctgatgggtctcattgtggatgcaggcagatctgaggcactcgctgtccaggtgggtgggagcaggactagcacaaagatgtcagctgactcagagtttcttggtctttatgggccaagtcgatctacctgtagatgccaggacaggagttgccagagtggacaggtagaagttgggcctaaggcaggggttgaagcaggtcacctctgtcctgagtgggggtgggagtagccccgtgatttcagcagactcagggtttcttggtccttaggggcctagtcaatctgcctgcagaccccaggacaggagttcccatagtctaaccaccagttcttgatctgaatgtttttgtttagatttaaacagttatttccatacaagtagttgagatgattaaagattaaaaagttcaatgccaacttccaaggaattttacataattcatgaatatttaaaaaatactggctgtggcgtagccagtcaaatttatatatctacaacacaattcctacatctaagactagatggatcttgaaggaaagggagaggaaagatagcaggagccagaggttcaggaagtctgtggtgacgattgtgtttttcttctagatatgacagggaatctacacccatgaaatctcatcaaaatggcagcctaaacaagacctgaacaaatacaagaacaattgacattccaagtggatggaaggaaatcttccaagacttcactgctagatgaagagctacaggcaattaacaactacagagagagagagagagagagagagagagagagagagagagaatattagtcttccccaaggataagctcctaattgttcatccatcaccaatggtcacctcaggcaacactcagttggttttatatatgtgtgtgagatataggttttatatatgtgtgtgatatacatatatgtgttacattcatatatatgcgtgtgtagtgtgtaacaataacagtgaaaggaaaagaggcctttaatttgagagggagtggggtaagagggcatgggattagagggaagagaaggacagaaggagatgatataattatatttaaattaaacaatagatcatatcaaattggatgggggcatctagtgttttgttcatcaccagattgaggaactcaataaattctcgtgcatcattttataagtagcaattttgtagaggcaattatagtttaaaagtaaatatgacaatatatctataagttaaatgcatttatgtgcattttgtatggtgtattttatcttttagttactaatatgtttctgtattattgtgtatgtcatatgttgtatatattacctatcctgcaaacatgcaagctctcctagactgtctgccattgtttgttattttcagtgtacctcacacagatctactttgcgtactggtgaggcttgagttgcttctagcttcattctagatatttctgagatgatcagtttagtgtattccaactatcctcacacaggtgttgccaagagcttctgggtctcagcccatggcttttcagttgacaatcaagttatagatggaagcacctagagtatacaagtggaaactacccattgtaatctatagcaggctgataaaacagagtggaatagactgggtagcttataaacaataggaactcatttctttataattctggaggctgagaaatccaggttcaaggtgcctgtggatctaatattcagtgatgatctatatctgacttgatgatacctccttgctgtgctcccataggagaaagaaaaaatgactccccaaagcgtttcttaaagacatcctattcataaagactttgacctctgacttaatcacctcccaaacaccctacctcataattccatcccattggtgattagggtttcaatttacaaatgtaaggaggatacattcaaactctacaaggtgagtttgacaattgagggatggagaatgggggtctgtgtgtccctctaacatttaagatgtgtcattctgtaatggaatttattgaaccttttagagttcagcccacaatactgaggcagtcagctcagtattgtgtcacattagctctgccccttccttgttgttctttcttgctcccttttctggctctctgagagtggacttcctacaaaattatgcacacaaatttttgcctcaggatcttaggttctggaaaacagtctaaggtaattccttgtgctccatgaaggaggcaggctctgtctccagtttttcttttctccattacctacattatccttattctaatgaattcgagtgttccagaaactctaaaagaattcacttgtgtcaggacactatttggaaatatgaatttgtatttttcttcttgccttgccctgttccaaactttcctacaaaaagtggataaagatgttttaattaaggagagaggtaaatttatgcagagatgctagggagagataaagcactgaaacaccatgggaatatcttggactccagtcccctctgtgttcaacctcagcataagctgtggtctctcagatggtagtcatgtgaaactccttgacaatctggtctcaggcactggggaaggacatcatgtcttctgcatttcctagccgagaccaaatgattttgtggaaggaaccaagggacaatggctaccctggtggcatcccatgtggatccaaaccaggagtagtcttcttgatatcttggccttaatgaaagattttaaggagaaagaccaagaacccctgggtaaattccaaaacaagcagagtccatttcttggcattttgtgtgaagctaagaaaataaagaaaatgggcatgcatacatcctatttctgcagagagggattcaggtctgtaataagacttttaaaatattgattaaatttttccatggactagttaccctagatctatagaaaaacaccctggtggccttgcttagacttcttgttttgtctaaagaggtgtgggtatttagcaaggtgtcatccatctcatcagcagagcttccaataaagtcacttgactggctgaactgtttgcatcttgcttgtaaggattaaaggtcagatgaagaaagtaaaggcacaaaaaggatctgccagagtcagtgacagcccagccaggcagtgagcattgttggaattgatgccatgttaccgccactgactgcttcaggtgggtcttgggggccatctctttgaaggtcactctgggccaaagaactggcatttggatgattttgtttgtaatgaattatttctcagtgaatggctttatgctaccacttgctattattttgatgaacaaaagcctgggatgacgaagggcagtgtgtatggtgtgctgtgtgcaagcattctgcttgtcataaacaaaaggcagttatttctcgagggacccagagtgtctgaggtgcactgctgaaataggtttatatttctaaagatagtgagtcccacgaagaaacaatgggataggacctgcttgcctttctgactccagttgtttttcaagaaatccaagaaattgcattgctgtggcttgggtagaagtgctaaattatgagggcaactgccaaaacaacacagtgacccattccttctctttggcagggctgacttagaaccaatgctagtatgggaaatccttattggtcatccatagtggaagagggagatcagaagatgttaattaacttttaacacgcatctgttttgtgccaggtgctaggtcaggatttttgcatttattatgttacttaatcttcattacaactcacagacagagcgacatcgagagagagaggggggtatactcttccgctttcggtagatgaagtctacaaagctatacaattaataagtcagtcttgcctcggtcagctgtttctgcatagctatagaatcacagtgtcatgcaacagtaagcatttatttctctcttgcttgcctataagaagactgaggtggctttgctccatgtatttcattttgagtcccaggttggggttacctgctactcaaactctttcttaccaagttggtggcagacatatcaagccagagaacatttgaggtctttgcttgcatcccagccattcagttatgtctggacagagcaaggcacatggtcatgagagattggggaagtatatgcttcccattgaaaggtacagctacttaaagatggaacaggtcagtaaagacttgataccagtcatctagttcccttgatgaatactgtagatgatatcctggcattgacatagctcattttcaagactaagttctctaaccatggagaacatggcacaggggacatttctatataagattctcttggttcacagagagtgctattggaagttgtgtgtcatactggaagactgtgtatagtgtgttgggttgggacttagtccttaaaccccttctcctctcccctcaaactcactctttgtcatttcatttgcttccatgactttacttgtcatctctggacagacggctcttgtcaatcctattccagcctgaggtgtggccctgtactttgcatgcacccatttttattggaaggtccaacaggtacctctaactttacatggccaaagccaaattgtttactttcttctgtaaatactgcattcctgactgcccttcgtgccatcagtagagaggtcaccccatctttcagtcaatgcttctcttctaatgacccagatcttttccaatagcaaactccggcaactctaacttgaaactatttctaaaacctaatcacttcttaagagcacaatccctattgccttagtccaaatatccatcactcggtgcctggagtatgtcagtatcctcctaaccagacatcctgcatctgtgctttgctcacatacccatttcaaacagcaaccagaaggtctagagaatgtaactagatctggaccctgttgaggttctactcaaattctccaaggcttccagctccgtgagagtgcagaataaagccatggtactgtctgtacccacctctcccatccttctgacctcatctccactaggctcttcctctctcacttcttcacaagcattgatcccaggactctcttataatcctcaagcttgttcctaccctttgcaaatgtcctctctgccaccaaagagctccatacatttaaatgactctgttcaaatgccaccactacaggtgatctcaggcctgattggttatagcatttgtccccctcataattctggcagtccccattcctgaatctttttcacttggctcatgctaataatcatcactctccactccattaaaaaaaaaaaaactttctaatctctcaatgggaaggtggatattcagtctgtctaatgcactcctaggaccagactaatacccagaacagagtgggtgctctacagtgggtgctggtgtagacgttcaaatgtgatggcagtcaggaggttgccatgaaatttagaacaggggaatgcttctagagttcgaaaactggtgccaagtgttgctggtccaaggaaaatggaccagagactgactaatcacactgttcaaatccctgtttgggtgcaggcactccttcctctgctggctgttgtggggtgggttactgaggatccagagcttaatcttttcaaggagttgcccttgcccaaaggcagctgaatcacccaacatgtcacctctttcttaggaacaatagcatttgataattaatccagcagtataaaggcctggccctgtacctcaattagggacaattctgaagggcaacctctcaggctagacttttgtcccatcatttctgctgtctctttgatgacctactttcatttcattatcctccacaaaagtgttgcctgcaaagttccatctcagaacacattttcacagaacccaagcaaggcaacgatttccttttgttttcagttacacccattcaagcaacattcaataaatatgtcctattgtcccagcgcagacacaggctctgaggaacacagtgatgagtatggtagaacttgtttatgtttgcatgaggctgactagatgagtaagtcaggaaaatacaatagcagagcaatggaataaagatacaaaagggtgggtctgggacacagggttacttacaccgcaaatggctaagcagtatggaggcagaggatgtgcaggttgctatggaggagtgatgggacacatagttgggaatgggtggtttggcattcattccagatgagttaatgggttgttatagttagatttggggggtggagtggggtatttcaagacaggatttcactggtgtcctgatatcactctgtaaaccaggctggccttgaactcacagagatcctcccaggagcctctgccaccccactgctgggattaaaggcatgtgctgccacttgacacacacagaatcacgtgggatgagaatctcaatgaaggactgcctagattggcttggcttgtgggggattgtcttgattacccacacactgtgggcgattgtactctgtgggtttgaatcctagactgtatgaggggagaaagtgatcatcaaattctactgacagcacacaaatctggaaggctatggttattgcttcaaagatatcagtcattttgtttttatttttatgaaaactatgcttttgtttgtatgcattctttctcttccaatctggaatggtatcccaacatttcctggtttaagagtttgccatcatcaccagtaagatacactttaaaagcaggacagagggtaaataatgagacatatctacagaagaaaaataggtggggaattggtgtgtgcatgcatgtgtgtctctctctgtgtgtgtgtctgtgaaaatataatatacacttccttgatacctctgagagatttcagcaagtacttaaattgttttttaaatgcttacttgagtattggtccttttgtaggatactttgctgagaggagctctgagaaatctgtttcagtgagatttagcatcaggaaaagacagtttctacgagactatttagactgccctttttatacaagaaatgagatgcagcctttgtttgggggatacctgccacatgcacaaaccttctgtgccttgtgaagaagacagatgaccaggaacagcaccaaagttggccttcaaatccctgtggggggcatctgctgtctcatcacctagacttccagtgaccagactggattatttcaaaacatttctctttctgtcagggattccttgacctccatccttttctaagttctggcagaaatagtcttatacagccagactacatgaagtttctctctctctgtctctgtctctgtctctgtctctctctctctgtgtatgcatgtatgtatgtatgtatgtatgtatgtatgtatatatgtatgtatgtatggcccaactcagggatttatatatgctagaccagtactctactattgagctatatatccaatctgtttataattttgaggcagacccactagttcattggtttggctttgtactcttttggtacctcaggaaggccttgaacttgggttcttcctgcctctccttcctaagtagctgccattgcaggtcctgagctatcagacccaactttgaatcttaattcttacatgaaagtttctgccttctctcttgatgcccccggtgctcctttccatattaaggggccttgtctgctttctatccctaagatgtcaccttagtaagctgtcagggaccctcttttgtgctgggcattcgccccacctggaggttgggcttgacctagtgtttaatacatctaatgccacctgacaaatgtctctgatgcaatttcataaatttgaagactgcttactcctggaatgtccatccctgaagactagcatataaggactttaaagaaaaggacttattcttttaatctagaaccttccattcagtgcctgtttagaattcctatcccctcagagccaaattcttttatgtatatcaatgggactaccaatatcacttctaagaattgtggtcatcaaattaaatattactgataaagcatgagacctcaataaaattatataactgctgttgccagtgctgttatttggcctgattcctttctatggttgcatgcatggcattactgataattacctaggccagttggttttggtccactatggtgagaatttcctccctgggagaggaggctaagcaatgtctagctactcttaaaatctcaataagtaaacaaagtttgactctaccaaacttcaccctggggaacttttttgggggggtcttatttgcatagcatagatgaagggtttatggaaaggagcttggttgagtccaaagcagctacaatgcaaagtctttaccattatggatgatggctttcctatggaacatagatagaaccctgctccctccccgcaagtcctccttagtctatgtattctgctccttcctgagcccatgagacaattagggcagaattacatatagatggaggaagtggctggatgctctggtgaggggctagtgacccccccttcaccaaccttcagtgcagagcaacagtcaacagacccagaagtaaagatttttgggagtaggagatgctgaactcatgaagataccttcatatcagcttggaacatagtgctgcacaccaccactcaggccattgtgtccaattgcagttccctagttcacgtcaacaatatggcaactagaggtttaagttcacagaagtctgggtatgtgtgtttaggtgccatagatagatggtctgtaactctatcacagctttggcactctttgcttccatttgtgctagacccctcccaagaggagtttctactttcacaagctgataaatagtattgcatgccaatcaagtccattgagaagggaccctgagacaagcacctatcctgcaatagccaccttctaatttgcatctcactgagacacacattccaagctgcagatgagtaattatgctttcatcagaagtaggatatgaggctttgcaacatagaagttagctgaggcacctaactggcctgaagaagcagggcaggggtaatccttgccctgctaactattggatcaactgttttgtcaaagcatattttcagaagcaaatagctgaacaagacatcagacaagatactgttctctaacagcttcaagttaaggatgcagaaaccaggtcccaggaagctacctcaccaacagtcaacccatgaagacccaaagtcagctctcctacttttagaccaggattgaaaagaaaaaagaagagaatagaaaaaacttgtactattaagacactaaatcaaccttttccagaattatatgtttctgcttttgcaagcctgcctctggagctgcttttcttaggtcttccttctgattttattcatgacaaagtacactctgtcagtcatgtagtgtaaaggcctaatcagaactggggtgggccatttggactgttaagggcattgtgggctggagagtttagtcagtaaggtgcttgctctgaaagcatgaggacctgagttcaattctcagaatccatgtaaaaagccaagcatggcggtgtgtgcttgtaatcccagcactgggggggggggcttgatggccagcagcctaggctgtttggtggttcaaaccagtaagagaccccatcaaaaaagaaaagaaagaaatgtgatggcacttgagaataacacccaaggttgaccttgacctccataggtgcactccctcaccaacacacactcacactaaaccccatactgtgtggaaatccagaaggtgacctgcaagctgagcttagatgcccagcttccaaagctgcaaaagatgaagtctgctgttcaaaccataccttttgttccattagctcttccgctgccagaaacctaaagatcacctctcctcacacactttctcccctgttgttttttttctgctacttacagaaaatcccagtggtctatactctttacagtaccttctggccatccaagacgacagatgaaggggctaagaggggcagcacagaaggacctagcaatgcagagatctggcactgtggggcagatcagcccgagaagagaaaatactggatcctgatttgttaaaatgttagtcacacttaataggtgtgagagaagaacatagattatcatggaaggtatgaaaggaccccgaagctcattgtagaatcaccaagtgagatgaaagaaaacctccaaacttgggtttgactgtgtataagaaacactaattatagtcatttatgtgagcagcttaccactgatagctaattaccatgcagcacaataacaattatgtatatcattaaatatgtatcagattagttttatttgattacaataataaactccagaaacatacaatgtcaggcatagaaggagaccttggagatccatgtttggggccaccccttcactttccagaggcagacacagacactagcctgtggcagttgctgatggtaacgctgagactggaaaagatagttgtgttttgccactaaactccccatggggaatgaggatgaggttaaagccagaaacccacaaggactatattcttcccgactgctctatttaagtaggcaagcccaatactatggtaacaccctgatgtaggaccttcattacagtgatgggactggagaaagccccaagcaagtgaaatcctgaatgaatgcatgctgttgatataggcctggccaatctgggcagtctcagacctgtgaaggaatggtaccatgtcccctcctctgccctgccccgctgcactaccctaaggtgaggctcagagaaatgcaaagccttccttgggggtgagtatataggttggtgggtaggtgctgtcagcggataggtgccgaaaagttccactaagctttctcccttggatatttatggcctgaagactgctatcctagactgctcctaccaagattagctaaacctgtctattcagtcctgctgtatgccacaaaccctgccttcttgtttctctgtctgtaataatgccacctccttgttcagctctatgttgtacccggcctctctgatcagttctatagaataaacatgttgagcttcctgggtgctgtggcttatctatccaagtgctcaaagcacctgctcgaagcctttgtgtgtttatcttttcttcattcccttgccaccccagcaaggtcaattcctggagtcttgtatgcatgggacacttcatgccactggctgaacatctgcttgttttcactgttggagccccagtggggtgggtgcttggattcaattaatagattaggtaaaaccatattggaggtgtgggaatgaggatgtaacctagtctgactcagcctgagtacagtggtgaggtctccccaacaccaaggttttcttctagatcagtggttttcaaccttccgaatgctgcaaccctttaatacagttcctcatgttgtggtgacccccagccacaaaattattctcattgctacttcacaactgtaattttgtcctgccatgaatatctgatatgcaggatgtctgatatgtgacctgcaaaggggtcataacccataggctgagatttgctgttccagacacttttgattgtttataatagggaccacatgaaacactttgaaatgcagactcccaagccatcctctagcaattcagatctagttgacctggctgagggtctagaaatttggtttttatttttggtaagtcttcagaaacttcttgtgctcagtagcttttaaaacatacaaattagagagtatgcctatcaagtcacaatctgaaaaaatcgagaaaaatattaatttgataatgttcaaggagaaaaattctatgctagcaacaattgggtgatttaatgagtcttttgggggtgaaatggcaagtagcacctgaggaagacaactcagtgtggcctgttggtaaattaagccatgccacacacagctagttacagagttgatgatgtggccctgcacacagagaacgcactttccagtggagagacagggaagcctttctatttgctgatgttaaataaagtgtgccattcagtataagataatgccatgcctctgaaagctcccagtaaccctttgtggtgaatttctgggtgacagtgtctcccagtttgcttgggaatgagaagtttccaggaatggagacttcctgggctgcaactctggcaattataagcactgtggtttattactcaccctttaagcccacctccaatggaagctctcacactaatcagtttgggtgcttagtaaggtttcattttccaggctggaaccatcaacatactggcttttcagtctgatttcaaccatttggaaaaataagacttgttgacagtgttgtgcaagttgtcatcttcttaattggtcagcagaattctcctacatggatgtgccagtctgtttatccattccctaggcagctttgaaaaattaatcaaatttcattttatatgtttttgttttacttatttttaatcccccctttttgagattttcatacataagcattgcatctgcatcacccaaggtaatttttgttcattgtgaaagctgccattagtgtgtgagtaactttcatatgcatgatattagccactattctagcactgttcactctgggcctatggataacaccccttgaccatatgaacgtctgccaccatctcagtgaggcatcggatatgaaagtgtatggtaaacaaggatgtcagatgggagatttgaggccacacaactgttggtggcaggttgctatgctggttagtttttgtcaactagacacaagctagagtcacctaggaagagggagtatcagctgatgaattgcctccatcagattggcctgtgggtatgtctatgggggcaaatgtttggttgcttattgatgtgggagggcctaacccatccattgtgagcccaccatccttaggcaagtggtccttgactgtataaggaagatagctaggcaagccggtaagtagcatttctctggcctttgcttaagttcctgctttgacttccttcagtgatggattgtggcctgggaaagttgtaagatgaaataaaccctttccaacctagattgcctttcgccagtgtttttaccatggcaccagagagggaactacgatacttattctatatatctcgaaccattttatgcagatacaatttcagcctggaggtagagccttggagcagtgtagggataaaaggcagtagagacagtgatcaccttgcaatgacagacaatagggaaacagaacaaagaatgcatacccaaggccttggagaaatgcctcatcttattgaagagcacctaggttaagcaggtcaggtctaggccaacagaatggctggcagaaacacagctccccattaagcacataaaacacatttcatctccttgagaaggctggagtcacttcaagctaatgaaaaacttaaagtgggcagagaagaagacggtcacaccttgcctctgacagctgtcttcagaccatcaaggcaaatcccagcatttccccctttgtttccttttccaagaaaagactgccaaagccagacacctgcagctttcctgtcgtttcccaagctgctgacattttctccaggtcagagacactgcatgcaaatacctgtctatctattcacgcctgccactcaggcagtgaggcaaaaaatctggactcaatccctgccttgggataattgcttagcaaacaggatgcacataatccattttcattattaatactccagttaggagccagactctgtgtttggtttctcataatgagagcggccttacaatggaggtgatgcaatctactattccgctcacagcactgagaggaggcaaaccccctcctcctgtggcagatttagattctaggcatttctactccccgtaaagcagcaggctagatgggcccactattgaagagtaagacgtgctgattttcttgcctgggtgattttgtaaaaatgtcctgcctgctcatttgcttattgtatattatgcgttcctaatctccatcagatagctccttcgaaggcatctgccccttaccactgcacacccagggagcaaaactgctggcgtgaagtagaacagagtttgaaagtgattgtcaagcggtgctaattcagatgtaaccagcacaaccctggtggctggctcaaccactcagcagaaacctggttagtttttaaaggttatgttttttgttgattttttttaatgcacacacgagaggcgcttcctgaagagagttgaaagagttctaggtggattcggttctcttccacaactttcattccatctcagtggaaagtggtttgctattaaaaggaaagataatccattatcactatgagtcctgaaccgccagggggaagcccgcagcgggctggaaggaagggctgataacttgcatttaaagaaaaaaaaaatcaattgcctgttggtgtcttgccgtcattcagaaataaagcataaatgtgaccacaggtggagggactgggccccttggaggctttgcagtgggatttgaagtcttcctatttaccactgggtgattagtttgagccctgtttggatccacggtgactgagttggttatttttatcagcctctttggtgacaggtgcccaagttacaagaaacaaattggcactaattggacactcctgttggcatcttggcaggagagagcagcaatggtttgatctgggaagctgtgcattaacaggaaggggaaactgatgctggctggacatggccacgctgttgggctgctgttgtttatttgttttggtttgctttaagaactcgagagatgctaattttgagtgtggcagttttcgtcagttttctagcgccatggaggcaagcacacatctacttggcctagagcgaatccttcaataatagtactcacagaatccttgtcactctgtgtactgggataattgatgtgggatatggcccagtggtaccacaaggatggccacagtgggcaggtcattgtaattcttttcaccagtatgcttgacagccaatctgccacatagtagtagatgctgaataaacaactgtgaaatgaatacatatttgttgagtgactgaatgagtccccctccttgtgggtgaatcaccatcctttcaattggaatcttgaacatgtggggttagaccagatgctagcactcatctagagaaagtgccatcattgttcagctgagagggactggcaggatgtgactgagcagagagcagaacccattttctgcatcccttgtttggtatttcaatgctctttggacagagatttcagaacacaggacactgctgctaatgaacagcataatagaccatgtagagagaaacctggtttctatatcaggagtctctcctgattatgtggcctccagaaaatcacttaacattattggatttctgctgtgcctagtctatttaaggagacagacaagtcaccaggcaattatgataacgaatgctacctttggataataggggggaaacctggaagaaaaggacaaaaaaaatgctgggccatatgggggtaaattatcttctagctctaaataatcagcatgttgaattagaggagggctggttcctaagaaggagcttgatttaataagtcttgaggggccccatggcaatttcagaagtgactcacccagcatactctaatggtccaccaggggggagtagaggtcaatttgttctgtaccagaggaggtggagtgatttgtgttttgtaattaaggggagggaaggctgtggccaatgcaaatctgaggtgttctatggtggcttttatactagtgtcttctgtatggaacgaccaaagctttgagttttcactgtgatcggaagcaaccttacatcgctgtggtaattgtccacaagtagaactccagagaggagggataatagcaggatggcttcctgtttatagacaaattctgcatctgttatgctacccacagtaaggaacccagaagcattaagaaacagggcaaagcagacgtctatggcagcaagtagccaaactgacaaacctggctggatatatggtccagcctccccagccctggtggataaacttggaagccatgcctcatggttttctagaaggtctccaggcactttgagagcagggctgcctcaccctttactgattttctcctttccctgtttcaccccctaatcccttatctgtgtgctctagaattgtctctaaaataagtgagttgcacccaaggatatgtccctcaggccttgctttgagtgagaacaagttaggacatctttgaaaagggagcatgtgtacccccagagctgacagtggtgggagtggggaaactcaatatcgaaggtcacctagggatatgacaacccagagaagagactgaatccgagggaatcccctgttcacccgaggactctctgcctagaccctggggatgttagaatcagttttcctttgtgtaagggagacagttctttcctttgaccaacccttctatctttcttttggttttattgaaggaatctattctgaggctgagacattctatggaggatctttttattaggtgagtgatgagaaagcccagcttccccacgataggtgtctgcccttgtctcatggcactgagcccagaggacaggaagatgagattgctagaacatggggcagaagctagaacctcctctaagcatctgcttcccacagtttagaaactaaatgaaactccccttccctacagaactggaaagaactctagggccagctgtgagcaacgaaaatgacaggatgtcactgcacgcttcttctgcccagtttttgtctgggagttgtcttacttgtggttcatttgggtgcagtttctaaagttctgacagcgtctggctcccaggagaagagggcctaatgaaaagaggtgtggccacaggaatgggggtgtggccactgactggagccattgtgtaacttgtcaatgggaggctcttgttaagtaaacatgcatctttataaagtgctcagactttatgtggttatgatgtctataactcaggtttttaaatgcaaggatttagtgcccagaacacagggagcatattctattattatgtttgattttaggaattgctcttggacaggactttgacacactaaagaatgtctaaatattgaaacttaagacctgtaaggtataaagcaattgatgctccattcctcttggtattgtgtctttcccccattcaagttaagaagcatttgggacatagaaagagaaggaactgaactaccatttctattggtggtcaaattgggttagaggatacaacctcagcatctagatttgggaagctatgcttccaaggatagaacctgcaacacagaagctgttctggtccctatcaaggaacgtctgttgcaagccttgattagttcagctgtaaagacagagaaggttctctagcctgcatctggagggagacactgggctctcaccagatcctacctagcagggtgaccatgtgttcatttctcctgcatgttagcaaaaaggtgacaggtcagggacttggctgagaatactcagggtttttatttgtttattcttttattgatgtcagcaattagatgcagtgctcctcaacccagagggccagaaacaagttagcatcttccctctttcccctacatgtagaggcaacccattccgttttttatgagctacaatagaaacacagcagagggagtagttctcccagtggaatatggttatgttgtgaaggagaagactcaaaagaagaaaccccattaagctcagccttgcatctcataatcatattctctacacagcagtgaggactgcaccattggctagctctataccatccaggtgtggataactgtgctaccatgttcacatggactaaattcccctaaaggtgtccaagttgttaatgcatgcatgactgtatctgaaggcctgtcatggaaatagagggcagagtggtccaactgctacccacaaagcaacggatattgttgtctcattatagtatcagagtaattatttctttccaacccctgaaaatattacctaaaaagagtaagtaaaagttttaaagcaaattgtcagtttttttttgtgaaatatatctaggtatgtatttagaggctggaaaaatctatgctgtgtctctactcaagaggctttgattctgtgaaggacatcatggatcaatacatatttttcttttgagtagaatggagagtaattgtggtaagcataattaacccttgaacatatatatcatgcaattatataagaggagcattctaaataatagaaaatgccttctattttaagttatatagatatatgattgaaatgataagatcttcaaagttctgacatttccccccctagaacagatgttaccagacaagaaaaagaggacataggatgagtgcatcctagagattgatgtattaatgaaatagtgtctgtaattgataaccttgtattagatgcagtctactatgtagaatgattcaacatacaaatattgagctttataacagtcaaaagtgttacatagtcatggcatctatactttctattattaatttcttcttctactgggtgactaaagtcctttgatactctttggtggtattggccagtggcatcaagtcacaatgcccaatcaagcacaggatcatgctgacagagaatggcattggatagtgttctgtgttcctcttttggcaagctggtgtgatggctaaactgaactgtcaatttgatgagtttcaaaatcaccatggaaactcaactttgggtgtgtctatgggggtatttcccgaaatgtttcactgaaaagggaagatccatcaggaatttagacaataccatctcatgggctagcattgagggctgaatgaaaaggaagctgtgtcctgagccacagtctctctctgtgtgctggaagcttggggatcaatatatttggcagcgcaacattatccaggactcaagttcttaagttcttctgcccttgtgctatctatctctccccctctccccccattccctcacactccctctgtctctccatctctttctatgtagccaaggctggcctcaagttgttagtcttcctgcctcagttgtccaagtgctgagatcatgaatgtgtgccaacctacttggttccttagctgtccctggcatgtcacctcatccttaggccaatgcccttgtttgtgcatgacagctctgtgtgctttcacagggcccaatgctgagcacaagtaattcatgagcaatcacagtgcaaccaaatttgcctcacatctctacccattgcttcttattcagtatttgtagttcttagcagttcctatgtgaacttccagtgggtgtaccaccacctacctactcatagttaatataaacttataatcacatccagctatgtacatgatcttgatctgttagtaaggatgctgagtagagtgggggcaaaaagaaaataaattggatttaatgtaagccttctctcccttcctcccatcaaatggcatctgtggtctgggactctccaacaaagtggcaagaccatgagaagagttgctgaccacaggcattgctcagaactgttaatacacagagatggagggtggggagtcagactttcaggcagtgctattctggctcagaggttttctcatggtcatggattctttgcccactcctgtggagacagctcctatgccctgtccggagacacagccaactttctgccctgagacacagattacagaaggattggagatgggtaggggagaggaaggatatcacttttatttatgtaattgatcatttctattgctttatttcttagtcaccccatccccagctttttagaaatagaattgctttaatctgtgactggtctggaatgtgctatattgaccaggctggcctataacttttggcaatcttcctgcctcctgagttctgagactacaaacatgctttgccatggccagttcttggtattttaagaaactgactcactcacttggagactttcataggcttagaggaaatactttgttaatggtgctatttacctgcgtttttcttaagagggtttgatgcatatctgtttggggtggaaagtcatgacagcactttccttcaacccccaagattgcagttcatttctaatgtgttgctatttggttctctctgcatttggagttggtcctaggatgaccccccagatagctaatcttcacatatctcatgataccttagtacttgagaatcaaatatcacactccaccaactcagcatgcagacttgtccaaaccttgtccctcattaccctggagctgttggctctcgtcctcttgacatcctctggaaacaggtgtaaagtcagtatcacagcattgctgggggcaggcctgagggaagcagctggtgttcttctctacttcttctggagggcagaggccccacagcataggatcaagtcttaaaacacactgtcagccccttctttttataccatggccttctggctaggaaaccctatttccccaaggccctttggaaatgtgtgaaagaccttcagctccatgcggattctgggttttaccttacatctcatttgaaagaagtgagatcttactttagcacccagttatatggacaggaaaacatcaatggaacaagaagattctccatttctgagtctggagacccccttcccatgaccctagaatacttatcctcagagtagcaccctgaaatatcactaatcaaggaactagggaataatgagactgccacagataaacccatgtttattattgactaggggtgaggtcatctctcagtgctcatagtcataggagaaaaaggtgatatatcaccaaattcagaagacaggtatccagtgatatctactaattgggcatgcagtatctatcagacaataatgactttggaaatatcagactcaagaattcctgccaataaattcagtgtaccctgagaatcattagactttttgaatgactgacagaactggataaagttttcagggtagtgcccaaatggttataatcagaacaaagatgggttggtggtgaaaggtgtttggcaaacaggaccttaggggctgtcagaatgctcacagtttctacctgctaacagacagcagatgaggatcccttctctctgggctttctctccctggggaattgtctctgtgttcaagtttgatcaggcatgatatacctctttttctcatggtttctctctggaatctcatgtcctcttagacatgcttactggagccttgcttcctttcatctgtagagagggcacagttgagtgcagtcagctacccagtatgctcttgggcttttctgccaacccccttttctgtcttgacctgtgaggtcttgctgtcagcttcccactgtcaatcaagttgaatcatgtcaaattatgcagtgctacaagagccgggttgagacctaaaatttcattttcacatgcaacttaagccaagaccccctttcagctctgtaggagtgttgaaaagaggctggatgctaagagccaaacaggtagcatgggaggccaaagtgagatgcctgtccataagccccgtggtgtcaggccactgtacttcccagatcacttctgatgtcctgtttcttggatgatagtttctaaaattccctctctcccattctcaaacaacatattattgataagttcttatttgtttgttctgtgttaatcatgatggacaatatcccaatctcttctttccatggcttattttaatatctaggtttggctctgtcaaattatctatagaatcactgagttttcaaatatcactgcttgggtgatagagatgtagtcaggacaaatactggggcccttaagaacacacccagcacagggcacgtatgcatctgtggcactaaactttcttatgcaaacactttatgtctataattatgtgctaatccaggatggaaagacagcactaggaaggcagagccctgatggcacaagtgttcacagcttcattcctggaacttatcctttatgggcctggtgatgttgcttttttaaagtttagggttggctcagaagcagatgggagggaaggagggagagtgtgatgactagaggagctttcagttctgattacacttggaagcttaaagctctcagcgagatggcccttatcttgattatgcccttgccaaagccgacattcttttctttccaggaaaggagagcagctaatattctgtcgttgtgacatccctgagtagagccacatggatggttaccatgtattctcagtcctggttggactgcttctcagatttatcagcttttcaaacctgcactaaactatgtagttcatgaattcatgcaccttccatccccggggtgactcttgtgcttacactctggtgtgctttccatttgttaattcactaggcatgtgtgatcactttcttccatttacaggtgtgaaaactgagacagagaaaggtaagtgactcacccaagataccagagctggggtgatgatgaggaaacagaatttggattctggtattctagtttggaacctgaaagtctagtctttctgccagtctgctgcattcttgccttccacagtagaggccaacattgtccctagataacagccatcccccagatgcttactgaatgagatgctttgaactcattgagaaaaggcaacatcagggatttagctctcactcccccccccccacgccccgctcctactggttagtgactcagtcactatgggagcaggggtaatcttgtcctagtctcaggtgacatagatatgataacatgtaacaggagaacaggaagtggcctacatttgtagctacccagaggcccatggtgagtcatctgtagaatggttgtcttcaagtgatgttcactcttggtttcttgagttctagaacaagttgtcacgcacaagtgacttaagtgatgggattttgtgtttcccacttatttcttttgtcattatttatgtcattttgtatcactacatatctcaatttggggattggaagtctaagatttgcatggccaggttcttgtggggacccagttcctggcttgcaactgcttacactcttgttccatcttaatgtagacaagagcagatagaggaaacaagctctctccatcattgtgtgcctgcaaactaatgataatatcaccctccaaagcccacatcttttgatacttggggtctgtctacaagaagtgaatttggtgtcaaaaccaacatctaggccttagaccagctgaatactctctttagttatggttctttattaaggactgttcatgtgccttgtctctaaagtagtttcattgggagtctatgtagggagtaggtagacaaggaaggcaggtggacaggcagttagtttacaagatatttgaaaaagagagcaaaaatcatgatttggccttcaagatttgcttccctgcatactctaagggtgcaactgcctcacttctgaacactctctcatatgtccccccacactagagctccttttctcatcttctgggtagtcttccacagtatgtatctgcagtcttgcccaagaactcctctgctaaataggtcatgaatggaggaacctggcagatgagagtcaggtctcatatctggggatgtgcattaggtaccaggatttgtgtatggttctgaaggcagtgtctgggtccagtgatgggctagtgactagctgatttagaaggctctgagggatgttgcataacacagctggagttcaggtgacgtcaaggatagctatgttagagccagaggatcacatgcaatcgtgggcaagagaatgtgaaaccagatcccagtaaggagaccccagatcctgactctttctacgccaggtgttgccagcatacatcattactcacagatttgttcatagagcatttgatcagatgcctttttactctgtgggattggtccaaattctttgagaatgataggcctatacatttctctagtgcacacatttgtgttgtctatatctgacatctccaccagaaatgtctctgcaatgaatgaatcacaataatcatgtctttgatgggttaatctatgtctaagagaaaaacatatatcacagtctgaatgtccagggattttatttgtggagaggttctctatagggataatcaaggaaaaatggtcgtctttagtcctatatattggtgctattacagaaaggcaaatttggatataggaagatctacatgtagggcaaagacaatgagaagagacacagggaagggaagccaagagagaccttttcctcacagtcctcagaaagacatactgtgaatttggccttccagtctctagaccagtgagataatgatttgtgctattttggacccctggctgacgatgtcatctgatggaaaccctcacaaggaaatatactgcctattgctacagaatgcttattctgtatgacactgtgttctaattgctttaaaaattttaattttgttagtctgagagaatctctatgattgataaaataatgttatttatccacagaggttaataaaattgccagagaaggttcagatagtaagtgacagaaagaattcaaaagcagtcatattgctgagaatatacactcaaccataatatgttaacaatacctttaacaaaaacatttcaaactagtgggctagggtcttagtcactccacatacattctagtagatcttggggaaatatatatatttctgaaaggtacctaagcctaagttcctcatcgaatcccacatgttcttatgggcatgatcttgtccctcatccaaagttggagtcaatttctctgtctttatgagacttggtatgaactatgacttctttgattaatgggacaagtgaaatgattctatgattggtccatgcatggtcctgcatgggcttagaagctattgcttactgtctcttgcagccagttgctatataaaattcaattattaaggctacaatgatatgagaaggccccaaacatggaaagaccctagagagatgctacatacatggagggagggagacaaggaaaagacagagaggtgccagataggaggggaagacccattttagaaaggaaggtatccatgatctccagctggtccagctgatgccaatgggtacccacagtgaagaactcagactgaccctcatacccctggaccacaagttcaggtaaaaatggttgttttaaaacatcagatgggatcatttgttacagagcgtagataacctcaaccctaaccctaacataatagctacaaactgagagcacaaacatgcacactcctatgcatacacacatacacacttagtcactcatatgttcctcttctcactcaagcattttcagattttcccagaagacttagaaactactctacttagcaacaagagatagagccattctttagatggggtcatgaggtaactgtaacttctgagggtctcggcgtccctatccgttccacagtccttgtatacactccctgacagtcttaccaaggcatttggacttcagatattgcctccttgttttcaacaaagccttccaaacattccccaactgtttagtgtcattccttgggtcatgcagcagcaagtgataaagccatgcccaagcgtgaaggttcctcacacttctgcccctagactgctttcctctgcacagagtccctacagtcaagggtgggggaagtacagcctggccatccaaccttccaaggctttcttgtttgcttgttcatgaccacaggaggggtgcttctccaaaattgaaacttcatactgtgccattccttcatctcatttccaggccccctgctgcgtgaccgtgtgacacacagtcattctgtgagaattgagaaggatattggcagtttgggagctgttgttcctgcttatgtatgcaaagaacataattgctaagtgcatcatctgctgtaatttacacacccacatatagcactgagcagggcattctcctcttccacgggtacccagggttgaagttgcgtacacactccagcctggagagaagctggctattttccaaggcctgaagcagcccagtggaagacttgaatggtgtgatttctaagacctccaaatgaaactggcagaattccttgtgaggttattttagaatgttcacagggaagatgcaagggccgtctgcagcatcgcgcctcttttggcatccttgcctcatgtgttttaggactcttgtcagagttagttgtaatgccatgtctaggacttatctgtacaagagatggtttcaaataatgaagtttcttgtgtcttcaacacccataccatggagtagagaagctgactgtcctttgagacaatcagggacaggaactcggaacttggggagaccaattctgatgtatcctgttgagaagattgtcttcactcttgggtttgcacccttttctaaggtgtggagaaagtttctgtgtggattgtgagatgggaagagtccctgtagccttatctgtgctcacagcactacacagttagccatgatgtcacccaaaagtgaagatctttccagaagtttgaggtataaccagcactgaatcccaagttatacatgctagaataagatgtgggttccactgtccactggggctatagtttaagtggatggctatattagaataatgagccaatgaattcaaaagaaccaagaagatattttggaagacaggccaaggagacagccagaaaactccaactagggatataggcaaatggttaaattctcacatcatgcctctgaagtttgaatctctgctcaaccactttacagcagtgtgacccagggcagcctatctagccactcagactcaattctttcatttttgagatgggtataagacctttgtcagtgattactgttgaagtttaaaaaagacttcaagcatgtggagagctaggaacaatgtgggacacttggtgagaactcagtgtgtgttagagccagcatttcttgctcctgagtgttccttctagcctcagagatttcctttgtaggttcttctatcgacaagcctcagctgcagttcccaggcttccaagtcattcctagcttcaaagttatgaagttaatctggcctttggactacagtactgtgctacatatcattttctagctgtctttctgtggggtggaaggctagcctatccatgcttcaatttctacatgggaaaagggaacaaaggtgtctaccacaaagtgacgcgtcgattgtgcctcatgaaagataggttgaaatactaactccagccagagtccatgttacttgatttggatatagagcctctggtgatacaatccagttaagacaggatcactggagtgggccctgctccatttagactggtgtttttaagggaggagggagatttggacacaaatttgtacttagcaaactatgtgaagacagacctaaaaggatgaaggttgtgtgaagatgccagaggcctcataaatgcaagaaaagaacattctctgaagccatgagaagccacactggctctgacaacattttgagttgtgactttcaccttttaaaactctaagaatatatatttatatatttgttgttgctaagcttcttggactggggtaccttcctatgtcactccagggaactgagaaggaagtgatgtacacaatacactatagcagtgtgttaattactgcaggcatttcaaagtatttatcctgaaggctttggagcaagtgatacagggccaccatctgctgtggaggagatggcttaatggaccaccagagcaaaagagatagctaaattcagatgccagctctcttctatggcattcaaccactagagggcatttgtaggacattagctcaataggagctgacatcttgtggtcaagtgaaggccgcacaattctggatgtcaagatggtgggaaacaaaggactcagagaatgaatttattcactggtttcttttacccagcagcaactcacattggtggagttagtggcattgagtttgtagagtgtagacatctcagcctggatcctgctttacttgggggtaggtagtaactgttcctccattgtgtaggaacaggcaggataaaaatctcaagaagtacaagaataattttaaagaggctgcagggagcaatgtgtgacagttttaagtgtggctctatgcctaatgaacttgaccaaacaaggcatgaaaatgggaaagctgggcatcaataatttattcttcagaaaggtaaaaagttgaactcttacaccaagtctcattgaacaggggtctccatgattcccaatctgggaaggaattggagtttgaactggaagaggcaaaacccacagaggcgagactaggattagacatttaattctgtctctctcggtgattgacattctagccgaccctggctgattcacttaacctgtctgggtgattgcttcccagtgcataaaataaggacaataccagtcatcagatcaattttctcgagttcattccaggcccctaatgaaaggtacattataaacacaagttgtaattatacctgaatgtgctttttactcagagggaaccagaagcctttgctggctttgaaacttcaattatgaaagttagaatcttctgcatttgtcagagatagataaaaaattattcgtaatatgaatcatataagagcaggttaatgatgcttgggatccaaaagtgggacattactgatgtgagcaaattgcctggaacctggagacttagagtctggtcttcattttttcactaattaaccccgaggccctgggcaagtcatttcacctctttgtgccttagttgggtaagaaatgtgtttaccaaacttcagtcattcttttcatgattttttgctgtatctaagaatcatctattctatccttactcacaatattttaaaattcatttacattggcaagcctttgaaatgtaaatgactgctgcatcccaatttaaacaatagtatccatgacattacagttttactgtgctagtttcacacacacatgcacatgtgtacacacatgtaactcactaaaggacaaatatgcttttcttgtgtatagtctaaaggtagacttgatttgtttggttgattcttttttaagacaggttttctctgtgtagccctggctgccctgaaattcactttgcacacaagcctggcctgtctctgcctctggagtgctgggattaaaggtatgtaccaccacggcccggctggttgattcttatatagttatgaaaccatgaagggaatttaaaagaagtaatggagaaaacagagataagctgatgattttgatgaaatctgggtttgtaccctagcagaaaaaaaaaaaaaaaaactgtactttttttttttttttttttttttttttttttttttttttttagattggtagtgctttccttaccagcgaggtaactgcatcagtgccagctacagctaactaagaaaagaccatcagaaatgtcaccaaggattccagcccccacagagtgcagaggtgagctgctttggcccctgccttgggcccaacttctgcctgtccactctgggaaatcccaccctggggtctgcaggcaaactggatgagtccctgaggacccagggaccctgactctgctgagattgcagggctatttcggcccccacagagtgcagaggtgagctgctccagcccctgccttgggcccaacttctgcctgtccactctgagaactcttgcccaggggtcttcagacaggttgatttgggccctgaggaccaagcaacccagagtctgctgacgttgctgtaccagtcctgctcttgcccatctggagagtgagtgcctcagacctgcctgcagccaccttgagacccatcagagtattggagccaattgcacccacctgaagagaaccctggacctatacacaccaggaaaggaaatgacatcacctgcatccactggaagaagagatgggaagatgacaacataagaacatatccaacaacaggaaaaccaatatgacaccaccagagtctaggggctctacaccagcaagaaatgaacatcccaacacagaagaagcagaagggagcaaccttaaaaacaacttcatgcagaggatagagaccctaagagaggaaatcagaaaatccttaagagaaatggaagaaaagatgaaccaaaagatgcaagaaatcaaggaagccaagaaaatataattaaacagctgaagaaaacagttcaggacctgcaaactgaaatagagacaataaagaaagcacaaattgaggaaatgctggaagtggaaaagctgagtaaacaaccaggaaccacagatgcaagcataaccaacagaatacaagagatggaagacagaatctcagaggctgaagataaactagaggaaataaattcatcaaacaaagaaaatcttaagtccaacaaatccttaacacaaaatatccaggaaatatgggacaccgtgaaaaaaaccaaacctaagaataataggtatagaagaaggtgaagaaacccaactcaaagccgcagaaaacatattcaacaaaatcatagaagaaaactttcgaaacctaaagaaagacataccaatgaaagtacaagaagcctacagaatgccaaatagagtggaccacaaaagaaaggcccttcgtcacataataattaaaacaccaaacttttttagaaaataaagaaagaatattaagagcagcaaaggaaaaaggccaagtaacatataaaggcaaatctatcagaataacaccggacttctccatggaaactctgaaagctgacctggatagatattctaccaactctgagagaacatggatgccagcccaaactactataaccagcaaaactttcaatcaccataaatggaggaaacaagatattccaagacaaaaccacatttaagcaatatgtaaccaccaatccagccctacagaaagtactggaaggaaaactccaacctaaggaaattaactacactcataaaaacagacaatagacaatagataatcccactttaccaaaagccaaaagaaaaagcagggtaaattcagacacaatacctctaccaacaacaaatcaaaaaagaaacaagaataagcactcaatggtccttaatttccctcaatattagtggtcttaacttgcctataaaaagacacaggctaacagagtggatacaaagacagaatccatccttctgctgcatacaagaaacatatctggaattcaaagacagacattacctcagagtaaagggttgtgataagatattccaatcaaatggaccccagaaacaagctccgttagctatcctaggatccaacaatttagacttcaaactaaaatcaatcaaaagagatgaagaagggcatttcatatttatcacaggaaaaatccatcaggaagaagtctcaattctaaacatctattccccaaatacaaaggcaccaacattcataaaagaaacattattaaaactcaaatcactaataaaacctcacacagttatagtggaagacttcaacatcccactctcaccactgtacaagaccaacagacagaaacttaacaaagaaacaaaggaactaacagaagttatgacccaactgggattaacagacatctatagaactttccatccaaacacaaaagaatatactttcttttcagcatcacatggaaccttctcaaaaatcgaccacatactcggcaacatagcaaacctcaacaggtacaaaaaaattggaataatcccctgtgtcttatcagaccaccatgctttaaagttagaattcaaaaacaacacaaattgcagaaaacctaccaactcatggaaattgaacaacacacaattgcaccattcctgggtcaaggaagaaataaagaaagaaattaaagacttcctagaattcaatgaaaatgaagacacaacatacccaaacttatgggacactttgaaagcagtactaagaggaaagttcatagctctaagtgctcacatgaagaaactagagaatactcacaccagagagttgacatcacagctgaaagctctagaacaaatggaagcaaaccccagaggagtagatgccaggaaataatcaaactgagggcagaaatcaataaagtcgaaacaaagaaaacaattcaaagaatcaatgtaacaaagagttggttcttcagaaaatcaacaagatagacaaacctttatccaaactaaccaaaaggcagagagagaacatgcaaattaacaaaatcagaaatgaaaagggggacataacaatggacactgaggaaatccagagaatcttcaggtcatactttgaaaacctgtactccacaaaatttgaaaatttaaaggaaatggacaattttctggacagatatcacttaccaaaattgaatcaagaacagataagcaacttaaacagacctataacctctaaggaaatagaagcagtcatcaaaagtctcccaaccaaaaaaagcccagggcagatggcttcagtgcagaattctaccagaaattcaaagaagagctaataccaatactcctcaaattgttccacacaatagaagcagaaggttcattgccaaactctttttatgaggctacaattaccttggtacccaagccacacaaagacacaactaagaaagagaactacagaccaatatccctcatgaacatagatgcaaaaatactcaataaaatactggcaaaccaatccaagaacatatcagaaaaatcatccaccatgatcaagtaggcttcatccctgggatgcagggttggttcaacattcaaaaatctatcaatgtaatccaccatataaaccaactgaagaagaaaaaccacatgatcatctcactagatgctgaaaaagcctttgacaaaatccaacatcccttcatgataaaggtcctggagagatcaggaataacaggaacatacctgaacataataaaaacaatatacagtaagccaacagccaacatcaaactaaatggagagaaactcaaagctattcctctaaaatcaggaacaagacaaggctgtccactctctccatatctcttcaatattgtccttgaagttctagctagagcaataagacaacaaaaggagatcaaggggatacaaattggaaaggaagaagtcaagctttcactgtttgcagatgatatgatagtctacataagtgaaccaaaaaactctaccagggaactcctacagctgataaacaccttcagcaaagtggcaggatacaagattaactcaaaaaaatcagtagccctactatatatggatgataaatgtgctgagaaagaaatcagagaaacatcaccctttacaattgccacaaacaacataaaataccttggggtaatgctaaccaaaaaagtgaaagacctgtatcataagaattttgagtctttaaagaaagaaattaaagaagataccagaaaatggaaggatctcccatgttcttggataggtaggatcaacatagtaaaaatggcaatcttgccaaaagcaatctacagattcaatgcaatccccatcaaaatcccagcacaattcttcacagaacttgaaaaaacaattctcaactttatatggaaaaacaaaagacccaggatagccaaaacaaccctgtacaataaaagaacttctggaggcatcaccatcctgatttcaagctctattatagagctatagtcctgaaaacagcttggtattggcacaaaaatagacaggtagaccaatggaattgagttgaaaaccctgatattaacccgcacacctatgaacacctgatttttgacaaagaagccaaagctatacaatggaataaagaaagcatcttcaacaaatggtgctggcataactggatgctggcatgtagaagactgcagatagatccatgtctatcaccatgcacaaaacttaagtccaaatggatcaaagacctcaacataaatccagccacactgaacctattagaagagaaagtaggaaatacccttgaacaaattggtacaggagaccacttcctgaacataacaccagtagcacagacactgagatccacaattaataaatgggacctcctgaaactgagaagcttctgtaaggcaaaggacacagtcaacaagacaaaatgacagcccatggattgggaaaagatattcaccaaccccacatctgacagagggctgatctccacaaagaactcaagaagctagtctccaaaacaccaaacaatccaattaaaaagtggggtacagaactaaatagacaattctcaatagaggaatctaaaatggctgaaagacacataagaaagtgttcaacatccttagccatcagggaaatgcaaatcaaaacaactctgagataccatcttactcctgtcagaatggctaaaatcaaaaacaccaatgacagtttatgctggagaggtgtggagaaaggggaacactcctccactgctggtgggagtgccaacttgtacagccactttggaaatctgtatggcgattcctcaggaaaatgggaatcagtctaccacaagatccagcaattccactcttaggcatatacccaaaagaagcacattcctacaacaaggacatctgttcaactatgttcatagcagcactatttgtaatagccagaacctggaagcaacctagatgcccctcaactgaagaatggatagaaaaatgtggtacatttacacaatggagtactactcagcagaaaaaaaaaggcaatggaatcttgaaattcacaggcaaatggatggaactagaagaaaccattctgtgcgaggtaacccagttacaaaaagacaggcattgtatgtactcactcatatgtgaattttagacatagagtagataatgccagcctgcaacccaggctgcctgaggctggtaaacaaagaggaccctaagaaagacatacatggtcccctggagaaagggaaagggtcaagatctcctgagaaaattgggagcattgggggatgggggagggaactaagagaatgagaatgtgagaagtggaggggtgaggaagacatgatgggacagggaggttgagttaggggaagaacaaaagagagcaagatgagagataatataatagagggagacattatagtttaaagagaaatcaggcactagggaaatgtctggagagctacaaagatgacaccaactaacaatctaagcaacagaggagaggctaccttaaatgccctctcctgataatgagattgatgactaattcatatgccattgtatagccttcatccagcagctggtggaagtagaagcagacacccacagctaaaccttgaactgaactgaaatccagatgcagagaggaggactgatgagcaaaggggtccataccaggcaggtgaaacccacataaaacagctgacctgaacaaggaaaaactcttggtccccagactgatagctgggaaagcaggataggactgatccagatcccctgaatgtgggtgtcagtgaagagaccttgtctgtgggagtagtggatcagtacttatcactaccataggaatggactttaggagcccatcccacatggagggatactccctgagcctagacacaagggggttggcctaggccctatcccaaagaatatgacagactttgaagaccccctatggaaggcctcacccttccttggggggcagaaagggtatgggatgggtaggacattagttgggggggcaggggaggaggggagggagagggacctgggattgacatgtccagaaaaagaaaagacaagaacactactgttggtccacgcaaccattcagaatgtagaggttccctgactgggtggaattgtagcaagtactgatacaaaggggcaaaggggaagccagagaatgtctacaagagaaattagcagcaacactgatagggtcagcgagggccaaagcatcacagaagtcagatgtagacaagaatagtctgaagggcaagagctctctgcaggtgcagaagcaagagccagtgatgaagagaagatgaaccagttgtgtgcagaggaagactgaggcagctctaggctaagagtggggcccttcagattacagacctactgtgcagaaggaaggcccatttacactgctccacttggacctcaagctgagctcctcagtttttctgtgatgcgcatgatggatggttttcccagtcaactggaccctgtcacttccctcatctcctccaaatgccaagaaatactgatgtgcaagattctcttctggggacaacacttaccatgaccatgagcaacagaagacagcattagcttctgcaaggttgagcacaatctggaggaggctcaggttggatatgcagaatttctgctgcacataatcaattcatttactacccacctagcctccatcccacataccttgagtgaagggaggcacaatggggtgtgtgatgatccattctggtttggcggggaaagaagcaaaacaattttctggatgctttggggggatatggctatcctcaggtcattttgttctgtgataccagtggcctcatgaggatacgcacaagatgcaacacaggatcttgtcctattgagaatgtgatcagggacaaagcccactgcattgtgaactccacgccaagtgaacagaagacacagagctgaagacaagaactttcatgaagtgcctcacatggtcaggctgtgcttgtttgcttgttggcacactccaccattgcactctccagtgagatggacccaagcttagagtacataggagtgacctcagatatacttatgtacttggaaaaatcaattatatgtatataacagtcattttgtcgatccattccctgcattgcgtcctacaacctgtaagcctacctttttcagtgcatcacatttcagagctgggtaggtccaggcagatgaatttgctttgaatgatgaggaaagagaatgatcgggcacagaaaaatctcttcttgtggattctgtgccatgaaaaatggtagagtgaggtgtctttatgaacatacccaaattagagggctgaccctgccatgtgtagtcctcacaggagaaaggaaaatagaacacaacatgcagctcttgggaccccaccctacccccttatcctcggcccagtgcttttggaatgaagcacagttcttatttagtttttgaaaagttgatgttggatttcagagtgagaccagagcgctggacagaatttagaattttagtaaatactaatttttgttatggtaaatgcctttctcagtattaatgagctgctgaccagtcagttgtctgctgattgacttgactctgccagcttcatgctctagttaggtgctaacaagtacagatggtttctgacttgtgatttgacttaagacttctcaattatatgattgtgcaaaaaatgtaactttatgatctgtattctatactaagtgtactttcacttttgactctttcttctcccagcttatgatgctgggcagtggtaaactgcagttgttgtcagccaaaccattgcaagggggaagcgacagataatcctacaacatgctgggtgctaagctctgaggttcagtgggttaagggtattagatgcatttctaacttaggatattttcaactgattatgggcttattagaatagaacccatcatagccaaggagcttacttaaagccatccataagttaatatgaataatattcaataacttaattattgactaagagcacatatgttatcaatttatataaagcaaaatcatgggaaattgacattttattgctataggttacatatagaattcaagttaaaatgtactgaaccattttggttctgtcaactgtttatacctttgagtcataggctgactcactgttgaggggacttttctcagtttcttcttcagagagcttgctcttggcaggtagaaatgctgctaaattctgaatgctgttgtatgtaagtgtagcatcctgcaactgtcctgaattcactgactgaatagttctaaccatttttgttgtttgagttttaacctatctgctcacatgatcttcaaacagtgtcagtttggctcctccctttcataggtaggtgcttaatttctttttcttgccttgctctggttgggaacaccatgtttaacagaagtggtaaaagtggacagtcttgacaaaatttagagaaatcagaagatgccaagaacacccattaggaacaatagtttctctagtaaaagatggtggcaatgttggatacacataggcactgaaatgaagtgggggtttatttctcaccgtacacaaaattaacttaaaatggatgacacaagacctaaattatgaaattattagataaaaatgtaggaaacatgtttcctgatattggaatagccaagaatgttttaagatctaacccccgaaatacgcagagccagaataaaagtttattaatgagattttatcaatgtaataaatttctacacggtgaagaaaataatcaaaaagtgaagagaaaacctacacaatgggtgaaaatatttgggaactaaaaattggcaaagggttactatccagaatatataagagaacctagcagtttaatgacagaaaggaagtctgttaagccatagccagaattctttatagacaggtgtttctcagaagagggcataagaatgaaggcctcagaagagaagaaagactaaacaccaatcacaagggaaattcatattaagacaaaacccagatgtcactgcagtccagttagaaggtctcccaaaggtagtgcttgttatcaagcatgggggacaatgggggctttgcagcagtgttggtgagaaggtaaattagtgcagccacaatggaaaatagtattggaattcctcaaacaatgaaaataaaagagtcatgtgatttagaaaacccagcactgggaatatttctgaaagagctgatgccagcatgtagacatgctgtatgcacacccatgcttactctagaacttgtaagaaaagctaaggattggaatcaatgtaagagtgcagctgcaagtgtggaaggatagacagtgcatctgcatcaagggggaactagctgtctgcaaaagcagcgtgaatgatttatctataacatattacatgaaaaaaacaagtgcagagagacacataccatgtgatatggagtcagaagatgttttcacaaaagtaaaaagttatcagagctggagagttggctaacccatttagagtatttgctgctcttgtagaagacgtaaatttggttcccaagactcagctatctgtaactccgcctccagggagatctgaaatcctctctggcctcctcgggcaactgggcttgtgatcacaaactctctctctctctctctctctctctctctctctctgtcactcacacacacacacacacacacacatgcaaacttttgtacacacacaaataatttaaaaagtgaagaaaaaagtagaaaatataataattggtaaccgagattggggagtataccatgggatagggagaagttgggcagtgggtatcaagttctaactagatgagaggaacaggttctaatgttcttttatgccatacagtgattatagtttatgtgttaacattaaaataaaataatcaaagggaattttgagtgttttcagtacagagtcatgataaatatttgagataatagatattttatttagcagggtttttattttatttttatttttttatttttaattactcatattgacatatccatcccccattccctcaccctcccatcttcccatgttccccacctaatccaccccaacatacccctgactcctccccagggatagtgagatagtgaggccctccaccaaggaccttcaaagtctgtcatattgtttgggagagggctgggccctccttgctgtatctgggctgcaatagtatccctccatggggaatgggctcccaaatggactttataactaggatcttcattctatcagtagatcaggtccactgtttcggcaggtctctccatccttgtcttggctcctttgctcaaccctcctccctctccacaactgaattccagtagtatgggtcagtgcttagctgtgggtttctgttcctgcttcaaacagcaactggatgtagactctccttcctctccctgcccctgggctccaattaaaagatggagtgcagaactaaatagagaattctcaacagaggaatccaaaatggctgaaagacacttgagaaagtgctcaacaaccttagccatcaggcaaatgcaactcaaaaccactctgagataccatctttctcttgtcagaatggctaaaatcaataacaccaatgacaatctatgatggagagggtgtggagaaagaggaactctcctccattgctgatgggagtgcacacttgtacaaccactttggaaagcagtatggtggtttctcaggaaaatgggaatcagtctacctcaagatccagcaatccctttcttaggcatatacccaaagaatgcatactcatacaataaggacatatgttcaactatgttcatagcagcattatttgtaatagcccaaacctggaaacaacctacatgcccctcaactgaataatggatagagaaaattggcatatttacacaatggagtactacttagagagaaaaaaaaaacaatggaatcttgaaattcacaggcaaatggatggaactagaagaaaccatcctcagtgaggtaacccaatcacaaaaagataaacatggcatgtacacacacatttttgattttttagtcacagagcaaaggatcattagtctacaatccacattgccagaggagctaggaaacaaggaggaccccaagagaagattgcatagtcccttgaaacaggggatgggacaagaatccttgaccaaatagaagggttgtgttttattatagaatacacacttatattggaacagattgtactcccccaatatataactatttggataaattttgaacacagcataaactttcctgtggatcacaagggcattgctgagttcattccactattgcattctcactgtagcttaacaccattgactccttcttggatttacctatgagccaaggcatgattcagaattaagattttctttttgctaaaaatatagattacatattctcaaatgtgcaacattccatatgggtttacaccacattctcttatgtcaaaacagtaagactgtttgatggagactgtagatgaagccatgttgagcagtgctttgctcccttctgctgacatgacccatgtcacaagcaaatgcctccataatgtccccctatagaaagcaaacttcacaaatgagttcagctgtcatgtgcagaggttgccccggccagcaattgagcacagaagggactccttgacaggtctagttctagaaagagatattttttgacagccagcttttctttgaggacaccttcaagtatatctgtctcccttatattgaacaactatctagatgctttcatcttgccttccctttcttcttcagcatgatcagatttgtgtaatggtctaatgggaccccgacctcttctgacctcctcatgtttacttttactttaggaaacccttaggtgcttcatccattttaaccctctattctggagaaatacagcaacaaagcacatggtttaagagaagtaggaaggaattcatctgagagtaatcttgtttgggtaggaaaggcatagtatcaagcaaataaaaaagcactgtgtgtggtgagggtggagagatggcctggggattaagagggtccctgcagagggacttaatttggctcccaacacccatttttgttgtctcacaggcacagacatgtataactccagatccaagggtgatccaaggctgctgggttcctcaggcacttgctcacattgcatatagcctcaaacatacacaaataattacaattttataatacatttggggccagtgagatggctcagaaggcaaagacacttgtcacacaagtatagccatttaagttcgatctctggattccacagtggaggaaaaagttttgattcccaaaagctgttctccaacctctacacctgtactgcggcacctatgcaaataccatgctaataaatgagatataaaggtaattaaaacacatcagtaattaaataattaaatttaatataaaggtaattaaaacacagtttataataaatatgaattgttgtatctaagaagatatgtcatgattaatatcaaagataacataactatatacatacaaaagatgaagcaagccttctaggaactttgaaggatggtacatacagtccagagcatgctgaaatgaggttagaggaatgtgctaaagctaagaagttgctagctgaagtacaggttaccacgtaacacaattttctcttccctttcatccctccaactccttctatgtattccccttgctctttttcaaattcatggctttttaaaaattgctggtgtgtgtgtgtgtcctaatcatttaaatgtaaccagtccagtccatataatgttctttgtatgtatataattccagtgttgaccatttggctttggataaccaactgggtggctctctcttgggtaatactctttctctcactctcaatattctatagttgcctatagttctttggctagggttgaagcctcttgaggtttctcctctccatgttagcatgtttattgctgtcatccttattcaggtcttgtttagacagctatgttgttgagacttgatgatgtaacttccctgatatttccaggagatataatctatcagcagaccttctggtcctctgattcttacaattgttccacccagttgcacatgatttcctgagttttagggacaagagttccatcacagatgtatcacttgggagtgaacaacacaatatcactttgttctctgtattttgatcagttgtggttttcagtaatggtctgtgtcttttgcaaagagaagtttctttgatgaggagtggctgcatctatatgtgggtataaagataagtatttggaatgtagttgggacttatgctggtctagaaaagtggcagtcgtgggttctcctctaagatccaaatcttcattagccctaggtagttgcctaggtttccaatacttgagtcatgatttccctcttgctaggcggggctttatgtccaattagagaataacctgggatttgtagaaaaaaatatagatagtatagagtttatcaagaacaaacattcaactttcatgtaataaactcatatagcaaaaataagcttaacttattgtaatacacaaggattatttaaagtccacacttgagatttgtggagcctttaactctatccaatttcccctccaggatctctgccaggagacattattgataaattctcttgtcctgtttacctggttcctcttggctgcaacagttttccaggctctcctttttctggtggccttcacagtcacggcgattccacctcagatgctctgttgagcaactcttagtaagatttgtttgatatccctgtaatgattaggttcaggtaatagagatgaacttgaggggagtaagattgcaaagactattctaatatcatatccacagtgtgtaccatcaatgccttttttaccattgttactattggcattgtccatcttgctgaagcagtgtttgccaggtttttcaagggaaaattacaacttttattttctttccttaccattactttactttttagaagtaaggcacagtgtatatttaagtctgtgaagttagggtttccctattttagggtggagtgtttctagtatttacttggaatttgcatgtcaaaaaatttttcctttttcccatgtatttattaattttgtcatttaattagattagcatggccacataatacacattatatatacatatatatacatatatattagcacatatatatatatatatatatatatttctttagtttataaactattaaaactttattttgttgatccaatcagtgcacatgtagcttctgggagttctttttggctggatttgtcttcctgatgtctctgcatcactgtggcttctgagaaaactatttgagcatagcttaacttattggttccacaaggtgctccaggcttatcttggagttttccaattccagtcctgatccttgccacttttctaaagaactccacttgttttcattggaaaatgatattagaaaccaaggtctaactgtgacatattggtttttccaagttctgagctgacttctctgtggcatgaccagtatctgagggaggctgtgactaatgagaatgattggaattatcatgacagatgaaagagtcggtataggcattcagaagacaagactgaagagatggctcagtggttatacagactactcctgcagaagacacatgttctattcccatcatcctataactccagctccaggagaagtgatatctctggcctcagaggtcacttgaacatgtgtgtacacaccaacattaacacacatacaagcacataacttaaaacaattagaagacaactttactggggagcccatttgggagtagggagtttgtgatgtgatcaagacttttgtagggctctccctgtgttccactgtaagttttagtctatgcatgagctttgtgtgatgtttatgaaagagaaccagatacccaaacaactgacctcaaagaagttatcaagaaactaaaccagagctatggctggcattgaacctggggctttcacagttcagttttcagcagacacagagagttgtcagtgttcttgtgcatggggagtagctcagccctattttaaggcccatgggcttctctgcatttcagtgtccttgtttgtacaatcgggataatggatctacttaatatgtgtgcttctgaggattgagtgtactagggtatgagtggatcgtgacattcactaacaatagaaaatggccatttgaggatttaatacaaagataccaatgttaccctctacatgcatatttattctcaatagcaatacgatattgactcagggtaaagaagagagaacacatagatgacatgaaagtagtagtattgtttcctttttaagaaattacactattcaaattagcatttaaccatggcatttacatgcacataaaaaaagttagtaagttcttatgtggatctgatgagatggattagagggtaaaggcacttgtcccacaagccaggtgcagtgagtttgatcccaaggaggcatagaaaggtgggaggtaagaactggcttcaccaagtcatcttctgacctccatacttacacaatggcaaagatgtgcccataataataaaggtaaatgatttttatatagtttataaatcccttcaaggatgatagggagtaaggaatgagttatctggaaaatgtgattcagacagactgtcgatagctgtgtcctggctgtcctctgtgtttcagaggaaagttcatataagggattgtgaaagttttaatagtaaagtcttaggctagcagggccagcatctcggtggccaagagaacaccaatagcagtgaatagggaagaaaaccaggctattaaatgtttgcatttggtgtgcttattagactgcttaggctcaatgctaatggctgagaggcttaacagaaatctgttctatcacagttactaaagtctaagataaaggtgctctttgagtagattttcttgaggcctttcttgatggctatggtcaactgatttctcattgggtcttccaaggtattcctcacagtgtgtgtgtgtgtgtgtgtgtgtgtgtgtgtgtgtgtgtgtgtgtgtgtgtgtgtgtgtgtgtgtgtgtgtgtgtgtagaagagacttcttgccccttcctttcttatatggtgtgctggctagttttatatgagcttgagatgagctagagttatctgagaggagggaacttcaactgagaaaaggcctccataagattagggtgtaggcaagcctgtagatcattttcttaattagtgattggtgtgggatggcctagcccattgtgagtggggccatcctggacttggtcttggtatatataagaaaacaggctgagcaaaccaccagaagcaagccaacaagcaacatgtctccatggcctctccatcaaccccttcctttgatgatgaactgtgatgtggaagtataagtcaaataaaccccttcctcccaaattttttttgttatggtgtcttattgcagcaatagtagaccttaccaaaacatatggatatctgttctattgaatgagaacccctcttcttttgtagattaggaaaaaagagtgcaagaaaaaatattaaaaatgataatagcaggaaaagagaaatatcttcaacccaacctagaaccccagtaaaatgttagcatgcttatttctagaatgagtgaagtgctacagcctgaacaccccttacgttatcttatcagggatgtgtctgcacgaagcttaatcagagatatacactcaaacaagacagacaccactcaccaatactgttcttgcttcagaatgaaaataacaacaccaacaacaggaaattggcctcacaagaattcattccatattacatgactggtctggacatgttaggatcatatgaccattcatttgtgagaggatatacaaatacacttagcagaatattgagagatttgtacacccataaagattaatacttgaactatatccaaaaaattagaaatatttaaaaagattgcaaggtgctttccttcatctctttctgaggctatacaatagcttttaaccaacaatatttttgggggggggcaggggtttcaagacagggtttctctgtgtagctttggagcctatcctgtcactcgctctggagaccaggctggcctcttgaactcacagagatccgcctgcctctgccttctgagttctgggattaaaggcgtgtgccaccaacacccggcaaccaacaatatttctaaacccttctattcccaatgggtagttcagtgtggctaatgtcacagttacctacatttttatttggtatgtttagaattacttatcaaattactaattaaggactttccgtggaatagttcaggatactgtcaagacaaggacttgttctccaatgtcacacaatacatttgggatgacagcacgtgcgtgcagcaatgttcataaaagtaaccatggacttaacatttttctaccacttcctgtggacttgacattctccacatggaagtttagtcaggctcctccccagaaagctctaggaagttggtatcatcatcgcaggttttgaacagatgcagaaacacagctcaaggagaccacaacccaactcttcaaaaccccacagcaagaagtagagaaaccaggattggaacctgttcagccactacaaacgctgattctttctggggtcatgtgaacgagacagtctggcacaaactgaggatgctttggctttgaaagaaaggcgtgaagagataactaaaggaagagaagttgggcccagagcacggacttgttgctcagatttgaagtgcacagaaatgggcgcagaaggagtgtccaggcgtcagagaggcaggagatggcgaggcagatctggtcggtggaaggctagtggaccagattatgaagagtggcagaactaagctaatgagcttgaaaattaccacagcggcattaacaaattaaattttgcatgggtgactgtatgaagaaggaatcctttaaaatcataatctaattggaaaaacagattaaaatgaggggggaattgaaaggtaactgcaccacatagtcctcaaactgggctgtgcacagaatcactagggggagtttttttattttttttattttttttttaaggctcttttgttttttaaatgccagtgtcagggctgcacctcagttccatttaatcagaatctctgaggttaagagcaggtgtcagatttctttaaagctcccccaggtgattctaatgtgcagccggggctgggagtcactgagttagattattgcaatcatgcagcatataataagttttgagctaggatgatagcaagggaaatgacaggatggagcaggaaccgtggagggaaagaggaagtgacagccataccatccaggtagcaattattacagggagggagggaagaaggagagacaaagataatcaactgtaagagaaggaatgctgggctggtgaagtcacctgtcctgggcatgtgaagactcaaagactaggagaaggtctggggaatcagatgtctgaggatcagatcaaaggagaaaggctaggctgtgatatatagagtgtgaattatctgcatatgacatacatttgcaatgagaaaagacaagaccccagagacagaacacacaaagaaaaaacagcaggagtttgggaggtgctcatgttcagagacagcgaacagagaaatagaaaaatggaggcacagaattcagattcagagagagttcaaccagacacgcaatgggaattggcgagttgttgtaaatgttgtgagtaatgatggaaaactcaacaaaatggggaccatgtaccctgcctagcccattgccctcaatacttggtgacagcaatactgtggttgtcatagctatggcttcctacctgaggctcttgagcacacaattttgcttgctgtgaatgcaatctagcctcttttcttgatgaggtgagaacacacattaagtacatgaccttgtctattaaataggcttaagattcctaggatatgttagaagacctaaggcagcaaaaaagtcaggaaaggggagtttttcaagaggaagaaggaacataaaattgatatcaagaagttgataatgtgaaaaacagtgacagggcactgacagcaagaaaagaaacttctcatgttagattcaaatcttggtctatctcaaccaccgaaaacatctgtatcttggcttctgtgctagacaatgaaagcagaatccaactatggtgagttgatgaattatgaaaagaatagtatctggatgcataaaggtgtgttgcaagatctacaggccagcaaaatgatggttaagctctcacaagatagactagtatttaaggaatttttttattcagccacccaagattgaacaataacaggtctgtgaagcccttagatatccggggctgcatgagtacgacactgactggctcagcatgggccaccacaatcagccacatgggctgctcttgggaattaggtcatgtgggcactaaatgaaggctgctttaaagtagtctacaaatacccagataaaggattaacagatatttatttggggaacactcacacaatgatggtaaataacctccacacacgtcttgctcctgaagacacagtctctgccctttaggatgctctcacctcaacccaagagagcatgaaccaacccctcctcttccttataaggggtcagtgggcacatttgaagtcacatcctaaggtgtggccaccaccccaagtccactgacagaacaagatgccactacatcttagaatacatatatacacacatacatctctctctcatatatatatggggatatatatatatatatatatatatatatatatatatatatatatatccccaaactaaatggatacacaccaatatatatatatatatatatataatatatatatatatatatatgttcaggaagaaccacataaaagatagtagctaaaggggaagaaacaataatgaattaaattttaaaaataggaaataaaatctcagagaagaaataaataaaagagactaaaaacaaaagatcacaaaatgaagagctggattttcacatggataaactcttgcatgcacacacacacacacaaggaaaaaaaggccaatataattggcaaatactttgactaggaaaaataagatcaggataaagtcagacaccaaataaaaagacattttaactgatgttacagaaatacaaaggatcattagatactgttatgataaagcaacaacacatagaaattcataacatttttatacagcagtaatagtctaatttcatctaaaaatagaactcaaccctaattctaccagttacaaatgaaaatttaggcatgagcttcactaaagtcacaatatcaaatgtacaaaatatttatgaaggaaaatgaaaacttgggctagtggtgcagatatctaagcccagctactcagaaagtaaaggtagaaggattgtaaattcagtgtccatcagcttgggttatgtagtctagcctggacaactttgtgagactctgaaaacaaagctgtcagtataacccagtgacaaatgctttttcatatgggcagtaacacagaaaacagacacagacagacagacaggcatgcaagcacgcaggcacacacacgcgcgcgcgcgcgcgcacatacacacacacccacacacatgggaaacatctcatgtctgtatatttgaagaattcacaatgttattaatccatactactcaaagcaatctttagatttaatgcaatccctagctaaacaccaaatacattctttatagaactaagaaagcattgtaaaataataataaaaaaacaacaaaaatacttgagtagccaaaggaatcttgaacaataaaacaaacaaacaaaaaacaggaacaaaaacaaatgcattataatacctggtattaaaacacagttaccataaccataaaaacagacaaaatgaccagttgaacataaaccacactaatctttggcaacactaccaagaatacatggtggggaaagattgattagtcttgttagtaaagtgtactgaggatattcagatatcctcagaagaataaaagcagatctctgtctctcaccatacatagaaaccaattcaaaatagatgtctgacctcggaaatccatggggcctcctgtagtagatcagtacttatccctagcataggtgtggactttgggagcccattccacatagagggatactccctgagccaagacacaccgggagggcctaggccctatcccaaaggatatgatagactctgatgaccccctatggaggcctcaccctccctggggagcagaaaggagatgtgataggtagggttttagttggggggtggcggggaggaggagaaggagagggaactgggattgatatgtaaaacaatcttgtttctaattcaaattttaaaaaatctgcaaaatagatgtctgagtttaaatatatgaaactactagaagaaatggatcatgggaaatcaaaatcatcaggcattgtaagaggcaaggattgggggtgtaagatttcaaatgcacaagaaacaaagatttggaacaagctcaaaaagcaaaaaaaaaaaaaaaaagaaacaaacaaacaaacaaacaaaaacaagttaggcttctgtagtccaaattcaagctaccatgaatacgaagggtcagatgtccagcactgtatctggggcagttgacgctgtgtttgttaagtgggaactgctcagattgcaggcatgtttggcaatgtcctttcttcattctttgtatctttattttaattgtgttttatgctaaagtcagaagtcttgaatgctagttttcaattaaaaaatagtctatatactcaatgtgtcaagcttttttccccttttcacttcttttccccatgtttttggagtgtgagcacagaccaactttataatgaaagcaggagggccagttgttcttgaactgttggtctacaggtcttccagatgttagaatttagagagttctcccatcattgctatttaattccatgggacacagggacaagtacaaaggttctcaatcttgttctgcaaatcattacagcaaatcataggatttccttacaacacacattcgatttctctccagtggggaaagtaactacaagataatgaaatgaacaaaggagacatccagataaaccagctaatcaataagaggtcttcataaacaaacaacagcagtttcaatgttgacaagatggctcatcaaagcagaaataacatgggtctcataagagtacaggaaaaatgaaacactaagtatggatgctagccaaatacctgagctgaatggcttacaaagagaaagggtttactttggggccacagtggtacaggtctccattcatgattgggcttttgagtctgtgacaaggcagcagctcatgacagagcactgggcaagctgctcacctcatgtctgggatgtgaagagagacgggaaaagactgctttctgagcatccccttcaaggatgcaccccccccccagagtcctaaatcttctcactaggtcctacctttcaagattttcaccaccttccaagagggctaaggtggagactagccattagtacctaggccttcaggggcatttctgatctgcagtacagcaatatggaagtctaacacatgcttagtaaatgtggctctcctatccttgtctattgccctaaggttgtggaaagtctcaactgggaggattaaatgggtcttgacatcacagggcaatgaggccctgcatgcctgcctgcagaaaatcaagtcaccatcagaagttgagggaaaggactgagaaggaggggctatgggggcatagattatccttcacatactttgaaatttttatgtcttagtgaatatatagtcagtgatgcttaattaaaagaaaccaggtaaaacactgtttggctgattaaaaagagtgggacagcacaagtagtataacaggaaacaaagcccctgtctatcagctacccatgctgagttaaaacaacacaacacaacacaacactaaacacctcaagaaaaaaataactggattattattattttgtcaattttcatctatcatgaggacacaatttatatcatctacagggtagagcaaggggtaacgtgagaaatagtgtaacttttagttagaagacttaaagctcatgtttctccttcattctggcaactgaagcagggtcttgaacatgacaagtcattactaggccaccaagctatgttcctgactcttaccaacaatttattctgaggcaggctctcattagatgttttgggctggcattgaacacacactcctgcttcaacccactgtgctagaactttactagcagaccaggtccatgcctgaaatgctttatcttgctatgtctgtccatgccctccactttcttttcttagtcttctttccttctaggaacacttctaatttcttcttttattctctttttataactgattgttggccaatgacttacctttatctctcttctttgaaaaacttcaaatgttttatttttattgtatgggtgtttttgcttgcacatatgtctgtgtaccgtggactattacccatagaggccaaaagagggtgtctcaccctttggaactggagttacagagctgtgaggcccctatatgggtgcaagaaacccaactggggtcctctggaagagcagacagtgttcttcaccactgagccacctcttcagctcctcagctccttcactgcttttttttggtaatgaatatatatatatatgaatcagttttcatgtcattctgtggctgctccaatttttcatcagttttagtttattgtttatggatgtagtatttcctcaaatcttccataggaaaatactgttatattttattactgtattatttttgattcccctctgtctgtttttatatttaattttctctttctttcatggaggaggattttaaaatgacttgaattttgaaggattttcatacataagtacgatgtattttcttcatatccctcttcctcccccttccaatgcttcccccatctttctctcccaaactcatgtcctcttccataattatatggtccatttagtgttgctgtatggacttgggcaccgggtgaccatttggacatgaaaaatctattagggagcttgcccctggagaaaattgaccctcactccctcaggagctatggatttcccagagctcttcaactatgggtgagaccttttgagtcctttcccaactatgctaaaatgttgagtggtgtggtctctgcaggtcttgtgcaggcaaccatagctgttgagttttgggtgcagcatccctgtcatgtcctagtcatactctttcacagcaatcttctggctcttacaatctctctgctgcctctcccagaatgcttcctgatcctagactgtagaggctgttatagatgacctatttgatcagggtctgcctcttgcactttaacaagttctggttctccataatagtctcccctgctggaaaaagaaggtgctttgatggaaggagagagctttatttatctatgggtgtaaggataagtatttagatggtagctgggtggtggtggcacacaccttaaatcccagcacttggaaggcagaggcagtcgaatctctgtgagtttgaggcaagcctagtctacaaagttatccagagaaactctgtctcaaaaaaaaggtatttagaaggctctcaatttagcacaatggtggtagttggctctcctctagagtccataagatctctaacactggatcatggctaggtatacaatactaacctagagttcccccctatttggtgatccttaagtccaattagactacagttggttacccccaagatattaataccactatcacaccattaggcatatcttgccagactagtagttactgtgatttgtaggatttgtatcagggtaagactactgctgccacactgggtagcttacatagatcccccttccaagtgtgggtgctttcagatcagtaccagcttgatttcttcaagttccatgattggatgtgtggtgtcatctatgctggaggttttgatgatctatctgataaaccttggctgtcggtctgtattgagaggagaaatgctgactctgctatctctttagatgcagaagcaaggtttcctgaccaacaatgcttgtcatcctgttacaattaggagccaaccactgaatttgggatagggaaggtggatccccagaatctaaactgtctttattttttattgtatcaactatcacttttcctaattttctataggatgggctacagtctattcaatttcttccaaaagaagtattctcatgctgtttttgtggtgattttgttcagagatatattctcagttataggttctgtctatggagaagagagggagctaattgttcttccagtccttcagtctatccattgtttttaggccttctcggtcttttctgtttccctccccaagctcctacagctgtgtctgcaacctcagggagattgttctgtgaagaataatttagccctatgtttcgttcccttgtaaaactcttgggttgaagttttctctgtctctttaagttcgggacattttctattttggagaaaatcattaacataagttgtctgatgatggtccattattccttctaacatatgtgtttatctgaacatattcatcattctattttctgtgtgatgctgggagagaggggatgtgaatgagtcacaagagtaagccatcacgaaacggaagtcacagatactctgaagaaaaccccctaactgctcttattatccagcactatggtaattttaggggagccttgacaatctagtcagaaaaatcatctctcttgttaatactgctctgactcaatgcttttcttcctcaggctgcacctacatcatcatgtgtcccctgtctcctcccaccctctccccactgccagatgcacttggggaacaatgatcttcatcagattggacttttctctgaagaatattttcctcttgtgacgccataggggacagagaaacatgagtgttcccagctggaatctgaaccttgtgtgggatgggtgtgaaggtttctaatcactgtttcaatgggtgttaatccatcacaaataaaaaaaatatgaatctccttgcagaaatgaaataatgaaatggagatttttcatttaagaaacacaaggccaggtagctgggtgtgatagacagagcacaggaagacacagcataagaacagcctctcataagatcaggcacttcccctctatccaaaacagtaagcaatggacacagctttaataaagaggcagctgagcaaagcctttgtttacatttcttgaatagcacaccagtagaatgctaactcaagccactgaaatgacttttgaatgtgactcaaagtcacagagatatatatccactttggttgtcttccccaccagtcataaatatgcagagtgaaggcttgtaaatctgccaattcacagcaaaaacattgccatgacaatctaactaatgatatcctaatactgcttttcttatctgaagaaagctttctgtttttgacagagaaagctacttcataggttgtttctcagaaggacaaaaaatgtgtgttttggtgctgcagaatatctgactgatgggcagaagacaaagagatgagttctgtcctcaatgcattgtgaccattgcctcccccccccactctctcaatttgtcatctgctttttaaatacagtttgtaggtagacattgaccctgaactctggtgccacatatcttatggactttataggtgattctaaaatcaccccttgttctagctaaactcttgtctgactctcttggataatccctgagtcttcctagtgtcatgctatgatatatgctttttcttcaaatgctgtccttaaattcttttctttgagtagacagagacctgtacagtaaatcacaaccaatcaaaatgcagagttgtggagctcagtcccaatggatacagctacacaacaactcctgtacctaaggttcagggaacaatacacaggaggggacaaaaaattgtaagagccagagatcagatattttatttttgaaaaataatttatttaactttattttatgtgcatttgggtgaaggtatcagatcccctggaactggacagttgtgagctgccatgtgggtgctgggaattgaactcaggtcctctggaagagcagtcagtgctcttaccctctgagccatctctccagccccatagagatcagatattttctatgagaatgggtctcctagtaaaaatggaggctatatccataaaatctcaccaacatgacttcccagatgatttccaataacaaataaatggtcaaccctgaaaacacacttacaagtaacattatatagactaagcaggttatatttaggaatacagtatatatattcctaatatatgtgtgttttggtgctgcagaatatctgactgatgggcagaagacaaagagatgagtcctgtccacaatgcattgtggaatatatatatatattcctaatatatgcgtgtgtgctatgggggaggtcctttggtgtatatgtttgtcttattggttgataaataaagtactgttggccaattggaaagcaagataggtgggactaggagtcaaggaggattctgggaaatgtagtaaaaggaagtcttgtgatacaggcaggaagtgacatagcaggcagactcatatataagcagggacaagaaggaaatcatccttttgctcctcctcttgctcctgctctctcttctctccagagctgctgtaggggatagtaagccacgcctgttagaggctggctacaggtgtgcctgaccacgcctgtcaaggcatggtcaaggtgaggtcaggatgatgtgggatgggctcttaaggggccacagagtgcatggaagccccttctcctttcccttctctctggcctcactgtttggctgcccagctagctaagttggtagaccatgggactcttaaacccagggttgtgggtttatgccccacgttgggtgccaggttttcttcccacagaaccccacatggctaccattgtcccatttcaacaggaaataacttggaggatgctatgccaccatcccccattattgtctattagggtagtgtaagcctagttaggaatactttcttattgtttagggttgggattggaaggaggtgttcaggttggacacctttcagatgactttagggtttagctgaaatagacatggttaggatgtgcaatagcagatttcttgtatttcacctttatgattgttaattttggatactttacactgttaagttttaatcctcttttagactaaaaggggaattgtaggggacagtaagccatgcctgttaaaggctggctacaggtgtgcctgaccacgcctgtcaaggtatggtcaaggtgaggtcaggatgatgtggcatgcatgctcaagtggccgcagagcacatggaggccccttctccttccccttctccctggccttgttgctcagctgcccctggcacactctggcttgcatttggctggtatttatctgaataaaggtatcttgaacctacaagctctcccatcaagctgccatgtgagcctaggaagaggatgccagcggaaggcgtcctctacaagataagtcttaaaattatggttgataattaagactgagctagcatataagaaatcctagtcaattgccagcagcattgtaaactaatataaatctctctgtgttaattgggaccttaacatggcggcgggtggaactcagacagcctggcagaaggtgaccacgtggcggcagggcttggaagaattgagtaagatttatcgttacatgtgtgtgtctatatatatgtgtgtattcatgtgacaaccattaataaagagtccatgaattgggaagacagcaagcagggttatataggagagttttgtgggaggaaagggagggagaaatgatgcaattatattataatctaaaaagaaaagaaagggtatatatatatatatcatatatcacatatatatgataaaaatgtatgcttctgctctaaggctcccttcagtatcacacgctcctatcaagcctactactgtgcctactacttctggcctatgcaccattttccctctcatctcaactttccatcacttttttgtcttactgtttttatgtgtagactgtttctgtcttatgcagctgtatgatactaaaaatcccagactttgtggaaacatatccatcaggcatttcatcaaacaaaaaacaattaaaaagggagtcaaagaagatttactacagtttaatttaaaagcccaatatataaaaactggaaacaatagctatttgatgcatgagagaagaaaaaggaaaaaatagtttatcaaaagacctacactcaggtcaatgacagaggtcattccacaagtcagagtcttatctgctcattcttccaactctctgtttttgcacaagtaagaagctggttcatggtagatggctcagtagagagttacacattagaattgcatatgagccaaaccctgggctgggttttccaccaaaaaggacatagaacgtcccttcctacctttacttgctgataatactgctgcaaagtgggaagtgagttatttttctcaggagacagatggaagtttactaattgactatttgcttatatctgggtgagttaattttctccccaaattctacagcagcgttatagctatagatttaaatatatgttgcaaaatattttgtgattttttcctgggtgacaatggaggtaatacaatgttggtacaaatcatggtgatttgtttccagttcctcagtaatctaatatgctagactgaaattcagatataattgtaattggtcaaatatctaatacctatttcctggtatatatctggaacattggaattttctatagattatccagtgacattataatgacaattctttgaagcaattgttatttatagtagttttgctgacagtgaaactgagtcatagagattatggggtttgactcaggaaactaactacagagcgtttagccctcactgccatgatttctatctgagctgcatttgggcaagctactcacagaaatgactgtaaatagctccaataagatgggttgacttcatttgcattcatcattcaataaaaacacataaataatcacttttcttcatagcaagagcccttgtgtatataatggaaaacggccatttttatggttgttattttctttgccaggagaaggagaaggtaaaacggaaaggaagaggaaagaaggaggaggaggaagtggtggaggaagaagaaagtggaggagagagagagggggagaagaggaggagaggagaggagagaaggaaaagcaactaaaaagtctggaatttggttttatttaagactccaccatttcccccagagctggaggaatacagcaaacaatgtggatggccactctctatgaagaaagcactctgtgagtaagtgcttaggagctaactgcttttgtccagtgacaactttcctttgtacacatactaatggtaaagtagaacagcatttagtattctaaaacacctatgataccgtgcataaagtgacagtcccacacaatcttacgtcacacagtgtttcaactaatggaaaatatgaaaatttaatattttttataacaatatgtttatatcagcacacacacagtttggatgtcaaacatacagtttaactaaacattaaacaaatgttaactcacagcacacatattagttgttttctaatacagtgtaaccctgtgcaatgttgtacaaatatttttgaaaaaattttaccaataatagttttgaaatatgtcttcagatttcttgataccttttcattcagagccatttttaattctaattccattgagtgtaagcactatttggtggcttacttgtaacatatcaatagggcagaaattgtgtaaggctgaggcaaggtcatagaaagattgatggctctctccaaatccccatcacttactgcctagaatttggcaaccatttgtgaggacctcaaatagacagatggggaggtttctgtcaaggaactggattcttccagcaagccaaggagggagattttctgtcagcttgtgtctgtgacatctgaggaatagatcttctagctccagtcaagccttcaggtgactacagcgctggcagacatattgcctgaagctttattagtccctgaggagatccagccagatgagctcctcctaaatcccaacccataaaaatgacgagaaaatatacattgtcttaagctgctggcttgggtggtgatttattccattgcaatagataatcaatatacttggttttcttgctgtacacacaactgttaactttgtgatgggttttagatttcctttacaataatttaaattataattctttgtacttcatttaactttgaatatattttatttggtctttttctttagtagtgaaactcattatttctaactggaaatgcataaatttggatttgtattagatttgtatcagctggtttattagggctgccactgtgcctccctggcagcagtggtaagtggggcaggttttactgatgaagggacctgagtggttttgccaggttctcttcaggagtaacaggttggacagctctgttgtaacgcagaagcttgtaagaaagagactggcattggagaaggtgttgaagtctcaagaaataaatattaggagacagatggagagaagaaacaacatacataaaatttggccacttgagaagtttctgaagctggcatctcctgagaaccccttggtggtttcacagggttcttacaagcttagacagcataagccctgttgtaggacaatggcaacaaacacttaggtgaaggacaatttcaccattaacattgaaaaatggtctaaaccagacaaaaggacatcgggagatgtcatgctggagatttgaacattgtgctactgaaaagcgacaagaaattttgaatgtttcatgtccctcttgggaagaactagaacaatgaaataaagactaagaaaaaccagattgcctatccagtgaaaattgatttcagataagaagcattgtatttactttttgtttgttttcttggtttttttgagacagtttttctctttgtagctttataggtagaccagactggccttgaactcacagagatctgtctgcctctgcttctccagtgctgggattaaaggcttgtgccaccactgccttgctgaatcattgtatttacacgtactttatttgagaataatattaattttactttttaattttatttttggcagtgctggggattgagcctagaggctaatcatcctaggtaagttctatacctgtgaaccaatgtccaaactcctgtacttattttattttgagacagtgtttcaggaacccaagtctggcctctaattcactatatagttgaggatgactttgaattttggacccgtttgcctccaccctctgagtactgggatttgagacatgtgtgcactggagaaggaactaaggcttcctacaagcacaaacactctaacaatgaagccacataccagctcttataatccattttgcatataaaaattttacaaacttacaacttttcagggttactcttttgtagttcatttggctttgtgcaggcactctgtaataacaatgtaaggtttgtactgtaataacaatgtaaggtaaggattatgttagaatatcaagcgatactattaggattacatgaagaactgttaaggctttggacaattaagaaaatgtataatagaagtacaactctgtaatacattgttgggagtcaaatctcagggcttggcatgagatcctaggccatgctgggcaggccacatagttaacctttacatagcagctccttagaacctcagctcgagaaaagaaacaacttgacccagtcctgcacccacaggctcagtcacctaggcaaccccttcctggactcatgaactctttaccctaccaaacatcctctaggtggcttcctaatatcctgcctacactaacacctggctcacaaacaaccccttctacccctccccatatcctgctctgccagctatatatgctagccagagagaaaagtaaagtttgccactttttgatttctttaatttttatttaaattagaaacaagattgttttacatgtcaatcccagtttcctttccctcccctcctcccatgcccccactaacaccctacctatcctgtcttgtggtcgttcttactgcatctcttgttcccattccctatccccgactctcttgccccaggttgatgtcctgcaggtcgggacaatacataagtgatgaggcagaggatacagatgtgcatgtcagcagcagctcttttaaagtaccaaattgaaagtttgtagtcacacaatcggtagaagtaaaggacacagggattatccaaatcatgagtggaagtatacactatttaaatgtatattgatgtcaacaaactagaggaaaaattatagataattttagagaataaatttgacattatagatgaaattaaaaactacttcaaattttatatgaatacttaaaagcatgtgtatactggggaaccagcatggaactgattcagaccccataaatgtgggtgtcagtgaggtggcctcaaaaatctatgggacctcttgtagtagatcattacttatccctagagtaggaatggactttgggagcccattccacatagagggatactccctcagcctagacacacaggggagggcctaggccctatcccaaaggatatgacagactctgaagaccccctatggaaggcctcgccctccctgatgagcagaaatgttattggataggtagggtgttagtggggggcatgggaggaggggagggaaaggaaactgggattgacatgtaaaacaatcttgtttctaatttaaataaaaattaaagaaatcaaaaagcccatatatatatatatatatatatttcatacaaatatataaatagaagtgataccatctaggtcaaggagaaggacaaataggaggaaggaggagtaagacaaggatggaatggcttagatatggtcaaagcatatgttataatcaaatgaaaatgtttatgaaaccaatcactatgtaaaataaatctatgccaacaaaacttatgagaaaaaacataaaatgaacttaagaagacataggcaacatgaattccttatacataataaggaaatggaatttgtacggaaacaatcttttcacaaaaattcaagcaagatgatttaagtagtaaattaatagtaagttatattaaatatttcatgaagaaataatgccagttgcacacaaagtcctccagagtataacgcttctcagctcatttttatgatcccaaaattacttcaaataaaaattagaaaaataaaacttaagaccaatatcttccatgaacacaaattcataagccttagtaaggtttcagaaagtccaatcaaatgaaatataaagagggtaattcaattttgatgtaataatgaaaaagcaatcaatacaatccatcatattactaaaatatgtaactatggagaaggctaagtaggtaaagttcctattgcacgagtgtgcagactggcgctcaggtccccagtatccatgtaaaaagataggtgtgcatggtaacctgcttgtaattccatccctgggatgtagaaacagaggttccccaggagcaagccggctagatgcttcaatatataaggctacagcaattgaagaagattctgactatcacatacatgtctacacatgtgcttatacataagcatatgtgtctccacacatgtaaatcacatacacgtatgcacacaaataacagacatgtacacatatacatgcaagaggaaacaagctttaaaaccgaaactgaaacaaatatccacctgtaagcccatcagattattttaccacccattcatacataaacccagaaatataagtgtggtggtttgaatgagaatgcccccccccataggttcatgtttgaatgcctgatccccagttggttcagcagtctgggaaggattaagaggtgtggccttgttggaataggtgtgttactcaggatgtgctttgaggttttaaaactacctcatgctttgtggatcagttttaagctctcagctacttcagcagtaatatgtctgcctgcctgctgccatgctctctgcaattatggtcatgtactcaccctgggaaactgtaaggaagccccaattaaatgctttcttccataagatggcttggtcatggtgttttgtcatggcaacagaaaagtaactaacacaataagataattttatcaattaacacatggaaactgcaaacatagctaaaatcatagttaatagtgaaggcatgaaataatgtctctctagaaccaggcatgaatagtcattctcactacttctgttcaatgttgtttatctaaacctatctgatagtttagtgcagcaagaaagaggaagaagaaacatataattaaaaaataagtagaaattaatttgttggcacaaacacaaaatgattgtctgttaggaaaaattaaaggattgtacccccaatcttctaaaactaagcaaagttttagaaggaatataattcatctataaatatgtagtcaacagaaagttaagttttatatctgtatataaaaactaaaaatctagaaaggatatttataaaatacacaataatatctagagcattaaaatactcaaaatgggaataaaattaacaaaataaatataagatgtgtacctcaaaaatgacaaaacatgactgatagaatttttaaaaggtactcaaccagtagagatgatatactatgttcatcaactagaaactagcattgtcaagatttaattctctccacaatgattgcagctaagtttcagcaggtggtgtgtgtgtgtgtgtgtgtgtgtgtgtgtgtgtgtgtgtgtgtgtgtgcgtgagagagagagagagagagagagagagagagagagagagagagagagagagagagagagagagagagagagagggggaggagagaaactgattctacactttacgtaatttggaacagacaaaacagagttgaatattcaaggtggaggatttcaactgattccataatctatcacaaattcattactatctatcataagaatggacacacagtgcaacacaataaaaccgagaacccccaaatagacccactcatatcaggtcaattttcccccaagtataccaagggcaaagagttttttcaactaatggtattatgttgaaattaaagttcatatgtttaaatttggtgaatttgattttatcctcaaacttaacccttttgttatttgagaaatactgttaagaaagttaaaagatgggatggagagatgactcagggattaagggcacttgttgcttatgtagaggacctgggttcagttcccagtacccaaatggcagtcacacctatctgtaactctattccaagcaagtctagactcttttgaatccagcatacatgtggtacacataaacccatacaagtgcacacacacacatacatataaaaataaattctaagggaaaattaagacaaaccaccagcttgaagaaaaatatttgggtttctattgctatgaaaagacaccatgaccatggcaattcttataaagaaaatcatttaattggggcttgctcacagtttagagattgagttcatgatcaccatggcaagaagcatgctaacatgcaggcagacatggtgctggagaaagagccaagagttctacatatggattggcaagcagcaggaagagagaattacaatgggcctggcttgagcttctgaaacttcaaacccatccccagtgacacacttcctacaggaagaccacacttactccaacaaggccacacctcctaatagtgccactccctatgagcctgtgggggccattttcattccaatcaccacagaaacatttatctgttgtgcattcagactcaatacacgcctgcttttaaataccaagaagagccaccatccattcaaaatggtcacgatagctgaacagaaatcttactaaagaagatcctcagagggcagaaaagcacaggaaatatgttttgcacttacttattagggaagtacaaatagaaaccagagtcaggtagctctgcccacctgtcattgtggctacaataaaaagtatgatacactgcatgctggcaaatgtttagaaagccatgaactcttgctgtgggtaggaatgcaaaagatcagagccacttgggaaaacaaatagggtttcttaatgaagcaagcaaattatacccacatgcagccattgcactcccagatattttttcaaacagaagtaacaataggtgtccacaacaagactgtccatgaatattcccagtagcttttttaacaggctcatgctgaggtcaatgtgatgctaatgtacttaaacagaagtgatgcttaattatgtttatgtagttggtttgttcttacatgtatgtcagtgccttcagaagatactctcctttgtagttcctgttctgtcagcttgggctacacaacaaaacccacatgtcagcctagacaacctaagcatggtgaggaatccttattgttatatgccactgacttttgagtaccttgttatgtaacactattgtgacatcttcctgtctcttattctttctcttttcatttctaggggatgtaggaaaagaaatctcccacttccattactataattgtcacctctggggagaaggctactccatctgcctccaggcccatcgcctccgatgagcccttgactctcacaaggtcttttcacagtgagcatctactttacaaagaaagaaagaaaagcatgaaatcacttcgataatgacactagaaacgtgtgcacctttatataattagtgctcagtgagtatttttttttatcaaatgatggggaaaatgtagttatgattttattgtgctacttagaaaaacttgccccttgaaatgataatgggttcttattttcctattgtaccttgtcattcagagaagaatagttccaagattttaattaatggcttcttaataaattgttgcctaattctcaagaatatctttaagaagtttaagcacttttattgatttgatttagatttgatatttacataagatatttattttctccttttctgcaatacaatgttttttatttttaataggaaaaaacatagctttaaatagattttaaaatattttttgttgttcagtttgggagtataataaggcaataatctgtcaatatactctataattgtaatgggctcaatgaattaggaagggactgattgtttcagtgtcagatgtgggaaaataacacacatgaacaaactaattgggaggtataggagacaaatttggggctgctggagataaactgctcaatagaacacttgctgtgaactcatttcctttctaaccccatccccaaggaatcacaaagatcttctccaacctttcttaccccaacttatgccattatcccagctccaacaccagcaggcataccctgggaacacatcaggcctgagcaggccacagaaatgggtccacagaaaatttcctaccaggcaacacatagccaccacagtctcctaaaatacagagattcagagaggaaacagaaactaaagaacaaaatacccacccaacaaagactaaaccatatatcagcacctagacctataaacatcccaatcccagatgcctagatgccagcattaaaacacaaccaacaacaactcaggcaacatatcttcactagagccaagcaaccctaccacagcaggccctgaagatttcaatataactgaagcccaagaaaatacctcaagacagcctgtatgaagatgatagagatccctaatgaggaaattaataaatccattaaaggaatcctggaaaacacaaacaatgggaggaaatgaataaagttactcaagacctgaaaatgaaaatagaatcattaaagaaaatccagactgaggggattgtggaaatgaaaaagataggaattcaaacaggaactacagaagcagtttcaccaatagaatacaagagatggaagagaaaatctcagccattgacgatatgatagaagaactggatagatagatcaggcaaagaaaatgtttaatctaaaaatctcctgatacaaaaaatctaggaaatatgggacactatgaaaagataaagatcaaagtataataggaatagaggaaggaaaagaaacctcgctcaaagactcagaaagtgttttcaacaaaacaataaaagaaaaattccctaacctaaaggagatgtctaaaagaacaccaagtaaattggaccagaaaagaaagtcccctcagcacataattatcaaaacactaaacatacagaatcaagaaagaatattaaaatattacaggaaaaagactaagtaaaatatagaaaattacaagtaacatataataacacgaagacacgaagaccaaggaacagaattacacctgacatcttaatagagaccctaaaagcagtaaagactagactttaagagactacagatgccagatcagactactatacccaacaaaacattcagtcatcacagatggagaaaataagatattccatgataaagccaaatttatccaacatttatctacaaatctagccctgtggaaggagacagaaggaaaactccaacctaagaagtctaactacaaccatgaaaacacaagaaataaataatatcataccagaaatgaaaagaagggacagagagagagagagagagagagagagagagagagagagagagagaataaaataacaatacaattaaaaaaaactggagtaatctcatactagcaacttaacatcacaccttgaagctctagggaaaacaaaaggaagaggaaatcacacccaaaaggagtatatgacaagaaataatcaaactctgggttgaaatcaataaaatagaaacaaagggaacacaaagtatgaatgaaacaaagagttggttctttgagaaaatcaacaaaattgacaaatccttatttgtcaattaactaaaagtcagaaagagaatatccacattaacaaagtcagaaatgaaaaaggtggcataacaacagacactgaggaaatccagagaattttaaggacatacttcacaacctgtactataccaaattggaacatctaaaagaaatggataattttctagaaaggtaccacttattaaagttaaatcaagatcagataagttatatacatagatctataaatcccagtaaaatacagttattaaaagtctcctaagccaaaaaaaaaaaaaatcctaaggccagatggttttagagcagaattctaccagacttttaaagaagagttaatgccaatactcctcaaattattccatgaaaaggtaacaaggaacactgtccaattcattttatgaggccacaattatcctggcagccaaaccacataaagaaccaacaaagaaagagaattagagaccaattgctcttatgaaaatagatgcaaaagttctcattttgcaagatgcaaaatgcttgcaaattgattccaagaacacatcaaaaatcaatctcatgatcaagttgacttcatccaaatgatacatggtggctcaatatatttctattaataactgtaatccactatatgaacaaactgaaaaacaaaaacacatgatcctctcattagatacaaaaaatgccctgcacaaaatctaacaccacatcataataaaagttttggagatttagggatacaagggacatacttcaacataataaaagcagtttacagaaagcctgttggtgaccatgtcatgggaataacaggtagcaattgactgcaggggattgggtaccagaaaacaaagctctgatgggtgaatctgggacagggaaggccccaagaaccttgaccccagaatgtctctgactactgctgtgtttgttgctgctatttttctgaggtatctggcatggtgtgaatgggtgtggagagatccccactgaccttaatgtagtgtgattatctcatggaaatatcccgttctactgggcatttttacctgtggattattatgaagattactgtttaaagtgctgctccctgcctccgagaaaacaggacagaagaatagaacaaggaaatgtcatacagctagcttctctggaggagccatatagactgtggcttaggttaataattaagacaaaacagttgtgccccagaaactaaattacctcaaattcttttaaacttaatgttgagaggtatgttcatgggtttctgggtacatcataactaaaacaaagctttaaatatgacctgaggttgggttaagatgtttttgttaatgactttgaggtagaaaatcttggaaaatgatttagagttcggaacggcataattttaacagctgagtgagggactcactgaggtcagggaacaagaacaatgatagcctggttattgctggctgatgtacttttcttgctagaatgggttggtgatcaagggtgatgattaaattccttgtacccatttctgccctcagcttcctgatagaaaaaaaaaaacctgttggtaagtgggtatgcaccctgaggatttaaaatagagccaactagttgttcttcatacataaaactttagatttgtgattctaacatattttatgagattaccttttgagataaataataaaataattgatccttctttgtaaccacataatgtagtcttccagtaaaagagctggttgggaaaaataccttgcctgcttatgctctgttaatccataacaagttgtttgggtatgaatatatgtgggttcttgggacttgttttccacctgtaacccctaaaatgtttaatcatgtaagggatatggaaaacatgctgttttttacttgtattcaccataatcattcaattgaaaagtagaatgtaaccacattgtaatttttatattgcttgaaagagtctattggggtatgtaagcttgtatgggtaaaaataaagacataagtgaaggaaaacaccagaaaagatgtagaaggaaagttaaaatgaagacaccaagaaagatagaagatatatattttaaagaaagaacaaagaaagagatgataaaacaacccttagagagtatatgtactttccccccctattcactagccccagagagttaagttttactccctcagatagaaaagttaagtttattgataattggaggactctgctggctcccgctcaaaccctgagctgcagctgtacaagcccatagccaacaacaacttaaatggagagaaattaaaagcaagtccattaaaatcaggtacaagacaaggttatctagtctctccacatctattcaatatagcactagaagactagaagttttagctagagcagtaagatacctggaagctatcaagaggatacaaactggaaagaaagaagccaaagtatctttatttatgatagtatatataagtgaccctaaaattccactgggtgactcctacagctgataaatactttgatcaaagtagctgaatacaaaattaagtcacaaaaatcagtagccctcctatatacaaatgacaaacagtccgagaaggaaaccagggaaacaacatgtttcacaatagcctcaaataatataaaatatcttggaggtaagtctaaccaagcaagtgaaagacttctatgataaaagaaaaatttcaagtctttgaagacaaatttgtaggcaattttcctgtcccatagcagctcaacaaataactgacccagagacttaatataaattataaatgcttagctgatagctcaggcttattactagctaattcttacactttaaattaactcatacttcttatctatgcttagccacatggctcattgcttattacctcattttctacacatcctgcttccttggtgtcttgctggcatctccctgactccaccctgtttcttcccatcattctcctagtttggttgtcctgcctataattcctgcctggctactgacagaacagcattttattaaccagtttgagtgacaaatctttacagtgtataaaaggattatcccataaaagaaattgaggaagaatcagaagatagaaggattttccaggcttattgattgataggattaatactaaaaatggacatcttaccaaaagcaatcttgtggtgatattttgtttgtgatccaataaataaagcttgcctgaagatcagagtgtggagatagctatactagttagccataaacagcaagcagtggtggcatacaccttaaatcccagcactcagaaggcagaggcaggaggatctctgagttcaaagccaccctggactacatgagattgatccagttaaaagaaaaacaaagccaggcgatggtggctcatacctttagtcccagtacttgggagtcacaggcctttaatcccagcactagggagtgagagacaggagtgatatggctgggtgaagagaagaatgaatattaggcaagagaagacaggagctaatgacattcagtctaagggttcctagagacagaactgcacattcagtctgaggattcatagggataggatcacccctttgcactgaagattcagtagagaaaaaaggtctcttttgtggctggctcctttacttctctgacttttcagcatttatgctgatatctgactctcggtatttattattaagacctactagaactatgctatgcaatctacagattcaattaaatctccatcaaaattccaatacaattcttcacagatctttaaagaaaggacaagttttagcttcatacggaaaaaaaagaatagattaaaaaatcctgaacaataaaagaattgcaggagctgggcattggtggctcaggcctttgatcccagcacttgggagacagaggcaggcagatctctgtgagttcgaggccagcctggtctgccaggatacactccaaagctacacagagaaatcccatcttgaaaagccaaaaaaaaaaaaaaattgcaggaggtctaaccttttctgatttcaacttgtactacaaagctatagtaatacaaacagcatggtatttgcatataaacagtcatattgattaatggaattgaattgaagttccagacataaacccacatactaatcaaaaccaatttttgataaagaaggcagaaataacacactggataaaaagaaagcatctgcaacaagtggtgctggtctatctggatgttgtatgtagaatgcaaatagatacatatctgtcatcttgcacaaaactgaagtccaagtgcatcaaagaccacaacaagaatccagatacactgaacctgatagaagaaaaggtgtggaatagccttgaacacattggcacaggagacagcttcctgaacataacaccaatagcacaggcactaagattcacaattaaaaaaataggacctcatgaaaccaaaaagtttctataaggaaaaggacactgtcaataggacagaaaggcagcccacagaatggggaaaaaaatttcaccaaccccacacctgacagagggctaatatccaaaatgtacaaagaactaaagaaactagacattaataaactaaataatctaattaaaaatggggaaagatctaaacagaattctcaacagaggaatctcaaatgaccaagaaatatttcaagaaatgtttaatatccttagccatcagagaaatgcaaatcaaagcaactttgagattccattttatacctgtcagaacgggtaagttcaaaaacacaagtgacaactcacattggtgagaatgtagaacaaggggaacactcctccactgttggtgagagcacaaacttgtacagccactttggaaatcaatatggcagtttctcagaaaattgggaattgatctacctcaagacccagctatactactcttgggaatatacccaaatgattttctaccataccacaaggacacttactcaactatgttcttggtagctttatttatagtagccagaaactggaaacaatctagatgtcccttaattgaagaatggataaagaaaatgtggtacatttacacaatagagtattacttagctgtttataacaaaaaagacatcatgaaatttgcaggcataaggatggaactaaaagcaaatcatcctgagtgagataacccagactcagattgataaaaatagtatctattcacttatatttggatatcagccattaaataattactaatctataatctgtagactcagaaaggttagatatagaggaagggactaagggaggatgcagagatctccctgggaaggggaaacagaatagagtttaggtggggacaggaacaggaaggatcagtttgggggatgggtaggatggaaggagagtgtggggagagatgactggaattgggggcacttggggggcggtgtggaaacctagtgcaatggaaacttcctggactctaagaaggtgaccttaatgaggacttctagcaataggggatatagagtctcacctggccatctcttatagccaggtaaggcttccagtgctgggatttggttgcagttaattgaactgttggctggggggcggctgttccatggaaatctccaaacaacccaggctgtagctaagacaaagtgttgttgtctggtaactgacagctggcttccattgccaagagcaacatccacacaattcattgaacatggagaactagtgcttacattgagccttcacccctaaattctagtctttttggttcagaaaggtactctgcaagctacaaaaagacaccgatccagccatgaaaccgaacttttgggagtagacaaccaatgtctaattttacttaaggactactctaggagaaggaacccatacctaatactacatgggtaattaagaaccagagactagacatcccagagacataggataaaaccaaatactattagtttcaaaaaacaacaaaagtaacactaatgatattctgctatactcatagatcagtacctcactcagtcatcatcaatttgcagcagatggggacaaatacagagactaatagtcagacattatgcagaggagagaagagacagagaactctgaacacagaacacagaacacagagctctaaattggatgtctccactaaatcccccccccccaggctccaacacacacacacacacacacacacacacacacacacatgcacacacacacacagtgtgtgagagagaaaaataaatacttaattttatcaaaggagttaatggtttttagaatagtaattggtctagcagaagcttgcaaatgtagaacagaattcccagaaacccagctgttgtttcccctattagtcacacctggcatgattatggcataattgttacaactggtgaaccaacatcagaacaccagtgctgaatgtcacaatttatttagatttcattaattctttttttttaaccaaaggtcccttttctattacagtatgccactcagtttactgtgttccatttaactgccatgtctccttgggtgccctttggctgtgacagtttccttgctgtgtgctctactcttttacagattctgtttccagtgtactagaagtacactctggctctaacggtctgatcctatgagcctagcaggtgtgggggtaatatcagaacttaagagtactgacaccagcatgacattactttccttcatataagtgaggtgatttatgtttagacttacatttttcagttttgatggctggtgaatgtggagattgaagagggagtaatactgcatctttcacctacatacctacaccaagaggcaagcttgtcattatgatacagccccctacctccttaaagtacccacatgactgcaaaagtcatatgcaacatcttttttctgtattcaccacaaaccataagttatgaataggctaaaaactggaagtgaattctattggcaagtatgtaattgacactctgaagaaagttgacttttctcactgagaattccttgttggcaaagcccgtaccaccgggagcttcagcagattgaaggggtgggttagcagcaactcagtaggcagttcctgtgacttccacactggtccatattgctctatagcctggaatgagtcttcaggatcaaaggtaacaaggtgtgactcctttccaccatggaggattcttgctgtgtcatatcccttcagagaaaaatcagtgtaagtactttactgagtgatggtttctaaccataggagtttcttacacattcattgaaaaatatttggaagcattagcattaatcatgtctttttattttatcttcttcctcctcctcctcctcctcctcctcctccctccgtgtccaagcatgtatacaattggtgctgtgtgcttcgacgtgtgtgcatatgtgtgtgtgtgtgtgtgtgtgtgtgtgtgtgtgtgtgtgtgtgtgtgtgatgggtctgctgtggaatatatatgacctgaaaggcttgtttgagtttgtctttgtgtggcttcattgggaaacaagacttttgcagatgtaacttgctaagaagaggtcattcttgactaagttcaaagacgagtaggcatccttagaagagaaaccagagatataaagacacacagagagcaaaaaaagccatctgaaggtaaaggcagaaactggagtaatgaggctgcaagtcagaaaaccaaggggtttgaagaccaccgaatgtgggaccaatcaagaacaaatcttcccctaaagctattagaaagggtttggtattgctaaaaccccagtttggaccgtaagcctccatatcaagagagaagaaagttttattggttctatttccagtttatgaattttgctatacttctttgaaatagacacagaggccactagtaaatagtcaactgtctgggccaaaaatacgacagatggaagatttgtaatgagaagagagacatatagaggccaacatcatagaggaggtaaccctgtatgtcactcagaatcttgtgaacaaatagaatcattaagaaggagatagatataggtagatggtaggtggtagatgatagatggatgataaataggtaggtagataatagatagatggatagatagatacataggttgatagagttcatatttagagtggcttttttttaggaaatttagaaaaataaagcctaccaaatcaggaccacatcatagtattactatagaagtaggcacacaaagatgctgaggccagcagattaagatgtaagattcagtagtgccagactgactgggtcacagagaacattactgggttgaaatgcctgaggatgtggtgcctttgggggaccttggagccaggagaagcttttagtaaatgtcttctcatttttcctgggtaattttcctcccaatggtacaggggccatggaaaaatagaggctttggcgtccagaaggctggaatttggatcccagttggtcacctactgggaccttgaagcaattacttaatgtcttagttcttaaaattgttagttttcttactcagattttccttttcagctggttcagatcttatgactatgactttatattctggcaagagtaagatattttgagggacatttccccaaaatggcacagccaatcagcaattattaaactggacactgtttggacagcaaattgctggaagaacatcaaagaagaaattacataacaaattaatgaacatacaaacaaagtcacgaaggctatgagtggctgagaaaaggcccacgagataggaaaagctcaagcattcattgcctctcctcaagtaagtttcttaaacgaaaagggctcaattgcctgtggcttctgaggctataaattgtggccacttgtgatatcaaactttcttgaaaggtcattgaaaacaggatcctctaaacaggatcctctgtcacacggcagctgaggttacctggggaaatcactgccgtgtctatgaagggaactagagagatgggtaaggcatgaatggatggcagttgcttagacaaccagctagggaaacagttctggctgttttggaacacactgtttgggcttcagtgatcacctgatgagttcagcttagggtgtatcacagccttctcgagttgggaaagtcttctgttgctagtgatacaatgctgcaggcccaccatcactcacatcctgacacatgagcacaggagagctcgtttatttgacttagggatcagtgtcaggaaagagctaagaagagtacctggcctgactcattcatgttatagatgaggacctggagacttggaaagcagggaggatatttttcataagccttttgcccccttgttctgtggctgccaggctaaagccagcttcaaaagcttgccactgtgcccaacactcaccttccaggtggctgcagggagacgagactgtatctagctgagatgtaactgccaaagggaaggactaatgtgttttttgtatattcatttattcttatttctctccagaaagattgactgggattcttcaacaaatcctctctcttcctctcaaaccagactaagaagtaaataatgaagacccaagctctggtattttcagagtgcttttacttggactgtggatttgtgtctccacatggagggttgtgctggaaaggagaggtctgttctacagacagatagccctgtaggaatggcccacagtcagacttatcattttaaccttaaatgaatcatctgctcatatttccagtccatctaaggaaatccactgaatcatctagaagcagaaggtctcttattttccatctctcacacctacatagagcctcctggcccttctttttcttttcctatcacagatagacaacatctcccatataaaaggcatgtctgaaggtcatattgtttggcaataggatatcacatacacttttgaatggcacagactctcataatttttcttcaaaaacagaggagtagcatttgtaaaatgaaaatctaaaattgaaaatgttctagaatctgaaacttgctggcatgatgtcatgtgtggagagttttacatctgttctcatgtaatagacacatcttagtgaaaacatgggtacactaaaacatcccctagaagtactacttggttatatgtacaatagtacatatgaaatatgaatggttttccttgggcctcttccccaaggtatctcagataacatctggagaggccagcctctaaaacctgtaggctgaagcattttggctaaggaatattcaacctgtttgagactggcaaaaagaaacttttaaaaagttaattttagtaacatacacttaccttttgcttttatttcagtaacattcataaaatctttctttaaaaatatgaaattaaatgatgctagtaataacagcatggtattgaaatttactcccacaacaattactgtttattcatatttatagaacacttcaaatgaatattcttttttccctattactcccattttatagatgaggaaattgagaatcaaagagcttaggtggaatggctttcatgtatcccctggagcactttgcacaggcactccataaagtatttatggttgatgtacattcactcctgggtctctttttgtacttaatatttgaattaatggctgaaccagttttttttctttccctcagagaagtgcacaccatgaaaatgtgcctctgggaatgcaaattgcccactcaatggattaggcaaccacaaacaaatggagattcgcacagatgtaattaagaatagaaaatacaaacctatgtgcagaaccatgatttacagtcaaattcacctcccttgaaagctcatattagattgctctcgtttgattaccaagctgctgtttcaatgcaaagcatatgcttgcagatccccaggtttgcccgccttaagaattagctaataactttgaaacaaacctttaaggaaggaatggtttatgccttggcaatgcaaacatgtgcaagtgaaaatatatgcatctcaactggttatttctgtagggaagacaatgtgtaaaaatatgtttaccaggagaaagattctggttttgagtatttgccaaatgttacacaaataattagtgatgtcgtgaagtgcttggcagctcctccaggacgtctgtcattggcatgaaatctgttcattctttagagtatggaaaacgatgatgctttacagcatccataggacatagttgctggcttctcttatataacaggttgctactcttttattattcttatggtttatctgagaaactgaaaaaaaatgattcccaaatcttttgaaaaagccccaattctactttccttatgaagcaacctataattttgtccacatcctgatagtcattgtcaccttccctctagtgtttttacatctgagggttgacagttctaatatcaaacccaaaaggaagattaaagagactgaacactctctcacattccaacttccagaaaagtaagggatatatatatagagagagaaaaaattcttcagcccaatttctagactcagtgacttcttctgatccaaggaagaccctgcctcatcaatagggacatttagaatgtggcttaatgttgttcgtcatgttgaccccaaagcagtagaagtgaagatcttaggaaagtagcattctcactgaatgcaggctcataggacaatggtaccaccatgaaggagctccacaccaggcctttttcagtagagaggagcctggtccaaagcctgggaggagtggagagctaccaggggggaatgtcttgattaggagccaaaattgtagacttgagtttgaaattcattcaagtcaaagaaattatgttggaagaagaaggccaaaggccagcattgagccagtggggcaagtcaaaaacaaccacagttgtggtggagtgaaaaatccaaactgaagagaaaaatgtgtcaggagcaggaggcatggataaggcaccaccaaaatacctgctcacttcagtgtcccagagaaagcacagtggcagagcagtcagtccccatctagactctgagttggcataggaggtcatatttactgcacagcacccatcagactgaccaaaagttctaggaagattgaattgggtaccacattctattcagatctccaagtcatgattctagatgaaaagccattttacagattctctccaacagtggcctgactctcagaagactggtaaataatatagcacaccaccacaaaggggagagtattgggagctaagccaaggagacaggaccgcatgcaagatgtgacatctagcctcagaagacaaatatattgattacatccatggagacgatgaagtgggtgcagtgtaagaggaaaaacctcacaacagaacctaaaaaaaatcatcatgcaaataagggcccattatttcccctctgcacgaaatgactggctttgagttttaacatgggagaagccagatggcggcagacgggcttattatagaaagtccacttgtactgaagttttctcagcactctttgccttgctgagtgaggttttgttttgtttcattcctaagtgtagggcaggcaagtaccaaaatttgtatacaatctgaaaccttttcatgaaaatgttctattcaatacctccgatacgtgatatatgatgccaccacaggaaaactagtgttgctacagacgttaatcataattatgaaaatttttaatttaaatgtaggtctgaacacacaaaatacagtgcatggccatctgttagttttccatctgggctcatttgcaaaatacattctgtttccctcccccctcccccctctatttataatcttccctggaaaacaaatatgcctaatctatggcatgccagagctgaagttagctatttacaaggggcttttaatagacatggttacacagttgaaagcagtaacagaaacttcaacttctctctctttctcttgcttgctcttcctggtgggacacctcgttagattttgtcggcaagctcttcttttgagggcccccttgtaaagaagagcataacttttctgtaatgaaaatggtgttaaaaataacatctgcaactcaagagctgtaatactcattattaggagaagaaccaaggcagtggttatcagcagaagggtagacaaaccaatgtgtcacacccatgcacatcaaaatgaaagcatgggtaccaatcacaacacagataaatggtgagaaccatgcacaaaaggaaagaagtctcacatgaaagctcacatattgcaagaaccactcacacgaagtctccaaaatcagcaaatctgtagctgtcactgattgtctatggagggagcatgagatcacgagaaatgaacagcaattgctgttagatttcttttgggggtgataaaaacactctaaaattagattatgttgattactgtagagcacacacaaaatattgaaatgtattctttagactgttaaatttcatgatgccaattatatcccaataaaggtattagaaagaaactggaaggagatacagaaatcactggtgcactttttttttttatagtctagagatgatgctcaggtcctaggggatgatggttactactcaattggttagtgttaaggtttccaggcctttatccaagggttcttcctaatatagaattctgtgtggcataagtaaatccaccttggctcacagttctatgagcaggtgaagactggtggagggatatgaatggaaataacagttatgaaagactctaatagaaacaaaggtgaggaagtcttcaaaaacctgcagtggcaggcagtatccagcagcactgatgggagcagaatgttgggaggtaaaatatccatgatttgcatctgaatgattaaagctggggaagatgggaaggaggaagattgtactgatcaaagagactagagggagtcacaaatggaaaagaagatgagtttaatacatcacaggaatctggaattctccatagctgggtattgacagagtagtcacgcctgaactaaatcctgaggaggagcagggtatataacagagacacctaagaggaatctcttctgatggaactcagactccaccaggaggctaagcaacaacgatgaaggggtctctgctgtgtaagattggtaaagcccttgagtggatgcaactatggaggagacacagcaaaggacatcagatgggaatgctggacctccaaggcataagagtagacagagcaaaaggaagagggaagagtgaaggcagactctaagatagaggtgggaaatcgagtcaggtcagatttaactgggactagaaagcaggtctatctgaagccatccagaggttctgagatggatttcgacactctaggctccctccgttattggagttcttagtttacacaggcagtgagtggacaattcaagaacttgaatcatacaaaagctctgactctggagataaggcaagatgagaaaaaaaactgcaagaattaaactgatgagacaagggagagtgcatggcattcaaatatggagcaaagcagctgggaacatgaatgagactgtcatgacaaactgtatgagaaggaatgtagagttccggataatttcctgtgtcaacgggcatgaaaacacgacccgtattttttttttttttctgcatttggatcatgggggatggtaagggtgaagtggaaacttgagtctcacctgataattaggtctcatctgctttcaggataaccaaattcagtactgtatagccttggaaagtttcagtggagaataaaagcaaacgaagggctctggtattggtgcttgccagagtccacaggtgtatggttcccccacaatactgttattctggggtcggggaacggcacatttgttggtttatttaccaggcaaattcctagcagtgcctagaaaggcaggaaatgtgggtttacataccctcaatgagttgttaagtctcagagacagacaggtagaaggaatctctctgaatcatgtgatcaatggtaaggctagagagaaaggtagatccagttgcaccagaggtaggaggcaaagtcaggtggaggtaggtatttacagaggaagtactgctggattgaatcctgaggactaccagcttttctcaggtagactggcaatggggtgtctggaaggactgtacatccctgtgtgcagagcataagcaaagaacctgaggcatgaacaggtatctgcatttggaggaaattccagcatttggcagttatggaggttttgctgtggtattggatgagatgggagcttttcctggagatgtctgcagggagagatcatggaatgccactcatgtcattgctcatccaatctgtctatgttctagtgtaatctgtcaagaacactgaggtaacgccttaagtctggaaatacatgaaacacagacaataaaaaagagagaagccaagagaggccaagtaagcaaaagggttatgtgctatcaggatggcagggccttaaacaccaacaccattgccagtgggggtataagacaaggctttcttgggagtgggagattgacctttcctctctatcacacataaatatttatttttacattattagatctaacccatctattatttccttctgagcacctagctctgttcttaggtctcaggccataggacagagaaatgtgtgggaagctgactgtgtgcaagaaactattccccactgctgtagagaaactgccatgagcccagagcataggaggttttgaacatcagtggtgtctaagtcagccaaagcaagcattttgcctcctgtccagcacatctagctcatggctccccaagacagctttttttttctcatgacagacactctttcttaatgctaaacttttaacatccttcaattttcaagacctcaacagaactccttgcccatctggaatattgccctccctctccttacacacggaaggtgtgttgcctggaatacacacacactcttatctaatactgcctttgtctttttgttcttggaacctctcaccccactcacattgtctctctaagagcaaacagtactttctgtcacccttgcatgacccacagtgctcaggacatatcggtattcatgaattgctcagtcaaaggcagctcctgtcttctgagtcttcagaaaacagaattcttccagtaacccattcagtccaatacaaagctacttggagaaaccacatttctaatgctgaaacaataaaccttcccatttagctgatagagaaatgtggtgtgttacaatgtaaaccaaattagctcaataaagagttttgactttctgctaaccttctgttgaaaacccatgagctggtaagagtcagaatggagctgttatatttgaaactaaactgaagaatcagaacagatgcaaggcataaaagagagacggcacactggctttaaatgcatatagcatggaactttgatgtttgcttcctaacgacttatttaaaattgtttgccctttgagctgctttaattttggatgccacacttctctctgggtgctgtgaagaatcgtacacatacatttcttgaaaggtaagttttattatttatttatttgggtacttattttctgacaggtcaactagcatggaaatcctgggccttaggagggctgagtctcatttttatatttacacagggggcatgctgtttctcgctgaagtcggttgaactatatgggccagtttctcttgtcggcttcttacaagctttgaaacggaagaagaaatgcacagcagggtaatccagccctttgaaatttgggaaagtgggcaagatgcactgtgatattgatttgtaataagctttgttcaggcagcatccacctataatacgatgaagattctttttggattaagatgcctggtggttgtaaatgaatagctgttacctctttatttggagttgggaggtggtgacagtggtgtgagtctatgattttcagttatttcctttgtggaattttttttggcatttcttttcaaggcatgtcctttcattagaggcacgaatgacaacgtgaaagacatgcctcttcaggagttaattcataacacatggcggagggagctgaaggaactgtgctcctgggtgcttctcactgacactcactatttactgagctctcatgactgctgggcatggccctggccctttaaagtaggatgcatatcatctcacatatccttgccaggtccctggaaactgcatccagcagttccatttctgagatgaggagacaggatcaggaaggaaggatagcctgtccaggactcagagctggtgaagcttatgactgacctaaggaataatgtttgtttgccttcaaggccaagcactaaaaactagactccgttcccatctccatcaaacatccccctgtaagcaggctacagagctctctgttggatgcttacagaccacagccctttgctggccaggaaaggcaagctggggccatttttgaaggaatgacttataccattgttttcttttaaatctaaccacttaattctaaaaatctacttccagctctgcacattgttcaattgggtttttgtctgtttcttcccagttgcccccacactcttttaactgggattgctgagaccttgtgtcaggaaattccaagttacttttagacctaagatattgaaaattacatgagttttttgtctattataaaaagcttaaaactgaattatttaaacctggatacctgcctacatgcactattatcattttgacacaatgatgcttttctttagaatgctgtcaggccatgtcaatccctgtttgaggcctttcagcatgccttactgtttctgttcctatttcccagatttcctatgaagttgaatagatttcatgtatcagcccttcacttttcacccaggtcagctggaaccctgttccactttcagagcccactgaaaggtccttgagtggactaaagccccatcctccataatttcatagccatggtgataatgctgaggtgggggctatggtgaaagtcagcaggatgatggaggctcccaggtcaattgtcttcacctttccaaggatcctggagtcattatgatgtaatgggtcccttgggaatgggaccttgtttgaaaatgcagacctttgctcacaatcatgtacaaggaacttatccagttgggccatgacccagtctgatagtttccttataagtagaaaatctgaatccagaggcagagaaaatggagaaataaaattatgggtggctagagttttatgtgcatgagtggtggccctccaacacattttgatacttacatgtgatgcttattcttggttgtaaacttgacatctgaaataaactaaaacacaagtggctaaatacactcaaaaaggatttgttcttaaatcatttcaagtgggatgattcactttgcatctggatctctgaggtgggaagacccacttttaacccagatctttagaggtgggatgacccacctttaacctgggccattccttctcatggcagcctatgtaaaggacatgggagaaggaagcttgctctttgctggcaagttcattctataattggcattagcgtttacttttttgggttttcaacatacattgaagaccagtcaagacattcagccttgtagactgaacaactactagattcttggactttctgttggtagagaaccattatggaactagcttcaccaaagtctgtgagccattcttataaatcctctttctttttcatcctacccatgcagttcctcaagggaattttgtaccagaagtggttctggaatggagcaacataagtacaaggatgactttttaagtgcccagaataggcttcccaatttgctgacacctacagtgaagcctttgcagctacttaaacctctcctagaagcgtatactgaaagctcagggtgtgaactactttacaaacttatggagacaaatgcatttgattattccaatctaccagttgtgagagacaacattgttggtgatcctgtatggaaaacttttgaaaatttgtggaaaaataagaaaaattatggtgctggttggtttctcccagcatctctggattaagtgacaagggaaaaagatgaactccataataaaattaaccaacacctagctttttagaatctggcgaaggacaataatgataaaattggcaggcttcagatgtgcattaactgtctgaaggcttttaggtgagccctgggaaagaatcatgtctcttcttcagccacagagctcaagtttcagacaatcaacccgaagccctcatcataagactggctaaataaatgccagtgaaaattcaagttccagccttggagggtgttggcaattaaaagaagggcattaattggcaaagaatgggaccctgtaatgggatggggatgtgagggaggaccccactgaggctgagaactttgaaccctcgggttctcaagggtttatctcacctgaggacatagtctctctacccttagcagaagatgtactcccacatccatcccctgagatactgccttttctgctcttgactgaggaaattaatccttcattatctgctaagccatcagtaagtttctctgaaggagatgccaggcaagacaatattgatgtcacttagggcccactgatagttgcctatagtcctataaccaggcatacagctaagcattctcctagacgggaggtaaaaagtcaagtccatgaggaggtgtgctacactataaagagcctaatgagtttgctaattcattcaagcggaagtctcgggaagatgtgtggcaatggattttaagagtgtgtgataatgatagaaagaacataaaactgcatcaggatgaatttattgatatagacccactgagtggagattctaagtttaatgaagctctcacagttgacaaaaagagagagaaggtgtcaaaagttgtttgaatggttggctgaaacatttgcaaaagatagcctattgaaaaagagttggagatgccaaattccccttggcttagtgttgatgaagggactttaagggcaattgcaagggtagagtaggtatttgtgtaaaacctaatccttcgcaacaggaaaacctagaaatatgtccttcactaatcctataagacaccaaatggtacatttgaagaacttcattttcatccttttccttataccagaccttcagtttgggagacactgcttctcagttggacagattaatgcactgggtttaattggaccctgaagtagccggggcctcgtggcagtactgaattgccaaagtcaaggtcatcacagtttttgtaatgggcatcccaggcaaaggaatgtccacaatggcctgacccataatggacaacacaggaaaagtggtttttaatggcaacatggcttatatggatgtttggtgctggctaattagtaatgatgttgccaggcataaaagagataagaaaccaacctcatttttgtttcttctgtataagcagaaaaattctcaaacaaatcagagaaaagctacattggattgtggtaaaagagaatcttggcccacaaaccatacttgagccagcttgcaggtctagaacccctcagatgaagagacagtcaggttcttctgaggaaggacattgataaaatatcaacaagctttactgttagccagagggtccttccccagagggacatacagccttttagaagggcaactatatactgggaaaaaggaagcaattagacattccggggtctgttcaatattggagcagaattgacactgattctgggagaccccaagatgtgttgtgacccaccagtaggggcttgtgaaagtcatgtgattaatggagttttggctgaagtcctattcacagtagatccagagggtctccaaactaatcctttagttatttacccagttatagaaagtataattgggagtagatatacttagaagttggcagaattcccacaatatatttttgttgaagtcacataacatctagtatcttttaatagcaggcttgcaaaactaattcagagtatgtctaatttataacagttcaacttatgaatttttgacttaagatgatgtaaagtaagaaacattcaatagagcctaaacctcaaactttgaagtctcacttttttcctgggctagtgatacacagtgtgataatctcttggagttctaggggctgtactaataccagtaagctgcagccccctgccagccacatgaccctgaggacactgttccaaagctatggtatcctgggcagtttgaggtactcaatggacctggagtagacttaacaggatgtgagctgattatacacccatgagtgttctttccctttgccttctcttttccccagaagacattcattttcttagtatcgccttcattctctcttaactggacatttttgccacaatcatcctgtctatagactcaattcccaaacatagataccaaacaggtggtatcaaaacctcatttcagaaggctggcacctgtagagcaaagatggctgccgcacctccttggaaatgaaacgctagtattacaatcatgcaaaccaaataccagaattgtggcagtgtttgcagctgccaccaacaggcccagcttctctgttgtggtacttttgataatgtaagcatgtggttttggagaatatggcactcccagaaaaaaaggagttagaggggatgctgcatgcaggagtgtccatttaatatttaaatacaagaaaatgtgaaagcataatgaggttccctttagggctatgtgaatgcttcatgtgtctgcctagatttggatatcaggaggacaagcctagaacagggagcctcagggtctctgtagaagagggagcagtcttgcttggtaggcttcctctcccatgacctccctttgactatcaaggatggcctattaattctaatttagataaaaagattttttagctatttacttgagatgagctgtagtttgttatttatctataaagtaatagtaattatgctccttactataccttcattttctttgaagcatttagaaatgtctaagtagaaacttctggagagagctgtggctagcagcagcagaaggaaccctccgtttactgaagagaaacttctctttttctgtcttaatttaaagtaattagttttagtgtcttgggacttttaagggagaggaagacaaaggaattgagggagagaaagagacagagggaatatgggagggacagatggatgatcagagagatcagacctgaagcagcgattcttatcccagggtctgcacaccaggggaactggtctttctggcagtgcaggaagccagtcactgaggattgccagtgctggcaagtgcagaggccagcaaatctcatcctcaaccactccaaagactagggctctctggaatcaggatggtgacaaggatagaaagaatggggtgctgaagtgaacagaggctggacttgagatttagcccagtcaagagctagcaagcatcactagggtattctcctcctcgttggttataaggtcctactggccacccgataggggtttctttcaatacagaaatcctggatttctgtgggtagagatattctacagactctcagagcaggccattaagtccttcacggatgggaaaattcaaatatgtgttgctggtcaagactatcataattcaggaaatccacaaagtttgtccatcccttgcaagctatggcagctgttttcccaggaacttggaataggactttgtcttctcaggaaagacttctaagtattctggcttattctcaatctcagctttgtaacagaccatgataacattcatctatgagtccataacctggttttccaaaatgcccacatgaatcatctctgcctgtatctttccatacagcttgaacttgtggacaatggagttcaggacagcagccatcttgtgatcttgtgtaggctgtcaattaagtagagagcttggatttagtcacttgcacctgtcacagatcagagcactccccatagattatctcttcttctagcttgaatttctgcattctaggattagacagatggcaaggcacacccctcagatgtcctggtaacccaatatcatgggtatggttctggttctggtattggtgttatctggtttcagcacagctggtgcagtgaaggaagcctattataaatttttattatgacatatttactgtattttgtgattggcttcataaagacaattgcatatgagtatttcatatactttgtccatatttaccactgtctcctttctctcctttccattcatttctccagatagtctcacttgtgccttcatataatacatgtatgtgtggacatgcgaatgactttatgtctctctataaaatccaggaaccatgagtgagagaaaagaagtgatatttgtctttcttagtttgaaatttcacttaacttgatagttctagttttttttcactttcccacaaatgacataaatttgttcttctctatgactatataaaatcccattgtttatatataccatgttttctttacacagttatccattgacagaccatggctgatttcatagcttaagatttgaagtggcaggatctgtagtttaaagaacatcccattcccagatgccatggggcaagggaaatattcaccaacccattgagtaagctaattcatagctctactgatactgtatgttacttttggtaataatagatgaaaataggaaagattccactcctaaagattgttctttccacattgctatatggctctgtcattgacccttattcatacaaaagtcctaggcactgcacaagattctggggcattgtagtgaatgaagcagagctcctgtctcaatgtagcttacatataaatagggaaagtcaacaacatgtgtttatgtcataagatacgtagaactttaaaagtgggaagaagtgaagtaagccagagagacccctaactttcttatagaatgttttatggagacaagaaggcaacgggtgagaacataatggtatatagagaaaccatctagaaagaggtagaatgaaataattaaggaatttgcttgctttgttggaggaagatcaaagagagtggccaaaaacaaacacctggcataggaatacacatgttctagctccatactttgaagaagactaaatccataattttatactctagctcttgcagtatcttaagatagggctaaggatggcacaaggtctaaggccacacccctactggttgtttggacatctatccctgtcccaaagaccaaaggtcttcctcttaagttctgtttctaagacaaaagcagtcttagttactatgccaaaatgcccaatgctgcagaacagttaccttagcttatgcactcttagacttgctgacatctatgtggctctatgtgaaattgttctagctacatcaaaacatggcagatatcactgaagtaggactgagggtgaacaggaaaggtcacatgaaaagataagggttacttttttatcataacaacctatttccataggaaccaaccagcatcctgctcaacctgcctcagtctttcagtgatataactgctttccactggacccccacccattatgtttcactatgtcaataacattttgggaaacaagctttgcattcaagattctctaagagacaaaaatcaagccatatcctgtccataggcgtaatcacaggaattctgtgcaaacgaatcacttatctgacaccctgattgctttatggagaaccaagaaggaaaggtggaaccagggaagccattagggcttttgaatagctcaagatattagtgttaagtaggtgagaagtgattggagtcagagactactctgaacatgtagttgacagaatgtcctgacagattggagctgcaggtgtgacagaaggaacagaatcaagaatgattctaaagcctttgtcctgtgtcactgggaggatggagctgacatgtgagatgcagggagtgttggagagagctttgctgatttattgtatatacaggcacataggacttctgctcataagcatgagttcagacacctgagtggtcatcacacatgcattttcacgctgtgtgatttaggcaccaattcctccagccattgaaatgtaattgatgtctacaaagagctagacctgcacacaggctaatgcccttgcccaaatttctgaatctcaaagctgaaagtttatgctcagaggttattaataaatcaggcagttaattaatcaactcaatgtacatggttttcggaaagaataaatttgtcctaaaggactgattatttttcgacaaacaactgttcactagctggatgtagatttcagcgttaaatttccaagtccctgcctgcacagattaaggatggcacattcaccttctctgcctggcttcctgcttttgatactctgaccaacccttagcattatttaaacattcttctctttttattataagaacgtcaaccagcagattaatggaaacttgtcctttttgtgtaatttatcttttgaagctgaaggaaaccttcaggggggatagaaaagcaatcaggcatccatttagaaaaaaattctctgattatttttttgtatgcagttttatatcatttcattttttcactatgtctatttcacataatttattacttgacactttttattttcaatcatttctggttgcttataaataaacatgtattaatgtcaagagaattatcattccattataaactctgtaaaccaaagcactggcttctgtgaagttgccatcttatttggaacatgcatctagattggatggtgcttgtctggagaattaaacactggcatgtgttttatcttggctaaatagaagtacttcttaatggagacagcgattaccaaagaaatattgtgcaggtgaggattatgcattttaatgttgttctgtttagaggttaattttaaagcaatttgcatggagggctgaattatgacttggtgcatctcctcagaaagctcctggttaaagtatgactccatgtgctgacatagcctcaaagatgatggcatgatttactatttcttaataaactatataaaataatttgttagagtatttaagaatgaaatacagggactggagagatggcttgatggataaaatacttgctatgcaagtgtgtgaggacctcagttcagatccctaggacccacataaatttggactcagtgatgcacatctgtaatcccagcattcctgtagcaagataggagagacaagaaaacttcctgagattcagaaaccaactagcctggagtatgctgtagtaaacaatagaagatcctgtctcaaacaaggcagaggccaagactgacacccaatgttgtcctctgattttcatatgtacactgtggcaactgtgacagacattacacacacacacacacacaccatatacaatatagcatttctttactagttggtcaagacacatgaaggttaacttctttatgtaggttagaagcaccccaggcctgctacctacaactgagccaatacctggagttagggtaagaaaaaaacatgtcacatcctttgaaagtatgtgtaccattttaatgcaaattctaccattatgaccacaatgctataatgctagcatttgttggcattaattgaaacaaatttaagagttaaataaatccaaataagtgattaatacagatttctctcggctctaggatacatgactattagaaattattagttcattcaatgaccaatacttagagacagatggagatacagtatttaaattttctttttaaagtgtgtaaatcttaagttactgcagctaaactggatgtcatttttttttttgtaggaaaccaaggcatgtgtgctcaaggccacaggatcaatcacactgattgatcctctccctcttccatgaatgcattcgtgaattttgccctcactacccagaagtcacagagactgttagccttatcttgcttaaaggacagtgaagggctggatgtgaagccatagccttaaaaggtgatctgaatctgccccgtgccctcagacttccttgattctagattcattgcctgaaacaaattcctataaatttcagaacaatggttataaagtctgacttggacaaggtagaatatctactgaaaaagaatttttgtacatctacagtggcagagctcaggagaagcccagaataataagggagaaaggaataataatttcattgatgcaggaataatcagtagacattctgcatccaatgtgttatctcctaagattgtctttaatggttttcttggctaattgaataattataccagcttgttttcttggaggtttgaattgtcagaatttcattggtaggatataaaggaagaaatccaaaagtttatgaaagtaagagtaataaggctgagtttacctctgctctgtccaaagtctacccaactctgctcttagaagggttaagatggggcctaattttcacaaaggatgaggcagcatagcagctttcaaaggatgtgtgctagctctcttctgcaagctgagaatgatggtttgggatacagccactagaaaagatctgttggttgcccagggaggtgaaggtacccagaagtgttaagtggctgataatagagcttatatacctatgaaaaggtaacattgtcattgtgataagtataaggtttaggatcaaaatcagattggctgctggagcccacagaaatcactggcagtatccatgatgtacctatgactgaagtaaatgagcaaccatataaaggactacttagtctatatagatagtagacaattcaaacctcccttattatcactagtcctgggaacgaaagatctgacttcaggtacaaaagtagaaattcaagtgaattcccaagcctcaatgtctaaatgcatagaaatccattcatgggcaattgtggacttcttgaagaaatccctacatgcctgccagtagtatgacccaaatctatcttctcggtttatctccacagccgctatttatcagagtaattgtgcactggctacatagaaacaccctggctttccagagcttagaatatactgcttataagccaatgcaaatcatctttgtaatcttttgggggcagtcagttgataaaaggtttaattccgactccatttagagcatgacaaatggatccacagcctcactatttcccagttttgagatgcacgggaaagagtggcaaagacttcttggcaactggcacaactcaagcatgctcatctcaccttgcatgagggccatattataataggaagggccgattgcaaccctctggaatgtgttgtattttaaaatgacattctgagagttggggagaggaccaatggataaagcgcatgctgtgaaaacatgaagacttgagtttcaatctttagaatccctgtaaaagctgggcactgtactatgtgaatctataatcctagtggtctctacttaaacccatggatgcatgtggacacacgagtagtgagatatccaccccctcacacctgtagcactcatggacttggccacaggtgaggacataattaaggagaggactagatctggggtcctggaccccagagcactatcttgattctgggaagcccacagaagagcagcctgtgtgggaacctgtggcagccatctgttccttctgtaagtgacttttcactgaaataaattatatttaatattaatccctagtcccttgagtcattatccgttcttccccacacatacatcacaaacacacctcataaacccctccccacttccctttaaattcatgtccacttatttcattaattcctgttgtatgcacatttgtatacatacatacatacatacatacatatatatttctaattctacaaccaccagtctactaagacaacataatccctaatgacaatctataaacatctgtccttatatccacaaataagtgcagccttcacccttcatcaaggaaccacagtcaatcaaaatgtagagttgtggagcccagtcccaaagaaaacatctacaaaatacttccacacccaaggtacaggggtcattgtgaaagggaacagaaagtttgtaagagccagaggatgaggggttcagctgtgagatcgtgtctcctagtaatgtcagaagctacatacataacatctcaccaacatgacttctcaaatgtgagctgaataagagcaacaccaacggacatgccacagtggaaggggaaaagtgcatgaggccccaaccctacactatatagaactataggcaggagtaggaggggtaatcttccctaggcaagagcacaacaattgcttgtccagtgccaggtggtcagccctgaaaacacatacaagtaacattatacagtaagagcaaatatttttacacgaggaaaagacatcatcaggtcatcccttactttctgagggggcatgacaactttctgcccttgctataggaactagtctctctgcccagagtgtgatctgcagagtggcagtattgctatctcctaggagagtgtagagaatggaaaagctgagctcccattttgattttaaaatcaaaacctgccactgagcaagagttacaggtgaccctcaatgactggtatgcacattaagacgttgaaaggaactgatcttgtctagaacaactttgatcacagtgactgtctcactgagcatcacactagttcaccgtacagacaacaaagctggaagtcacaaatactcaaagttgtgagatacatgatttcaacagtagaaaataagcctatgaatagtcattatattatatataatatagtcatgtccctgatacctcagtaatattttcagatgcctgatctgatattgagaaagactatttaaagaggaaaaaaagatgggttgaatgtggctcagtgatgagcactttgttcgcatatgtgaggttctaggttcaattcccagtactgctgaataagaagaaagaaaaattaatgtacctataccatctatcactagaatggagtctcaatgtttggtgaagaactttgctttggcagagcacacagacaacatagaaagatgccattgtcctcacttgctgagtattagcaggctaccagttctggcagctgtgaataatcccagagcaagagagaattttgcagcagatccagcctgccgtgcaaagctgattttccatgtcagccatagatacaactgtagtataatcagctgtaattcatatgatcttaacattccgtctttggcaaatcctaataatagagtcaaagaatgtgaccacagagtttgggtaaaaaggcatgccatgtttgggttgtgaaatattctcatgttgaaagcacagtgcctggttcattgcttggccctagtagagactgtaatcaaacataaaataccaagtgactatgccatttgagttacagctagtggattaagtgttgcatgttccactgagacttgaattctagaatgtgtaacagaactccaccaccaaatagacacaccacacaagtgactggacttcagcagctgttacatgcatgacgaagcttgtgtgcaaatagttgactctcagggtccctactatgagagaagatttgaagaacaattaaaggaatggcaaagaagattgtgattgatctagcttagaatggctatgagcatatttataataaaaaatgtttccactaaaatgagtttctctcatggctctgaagttaagagcactggctgctcttgcagaagaattgagtccaattctctgcgtccatatggtggctttcaaacttctctaattccagttccaggggatctgatgccctcttttgttctctgtgtccatcagacatacatgtaggcaaaacacacatccacataaaatcaagataaataaataaataaataaacaaacaagagaaagaactttcccaatggatgtggtggtccacacctgtaatcccattactcagggtgtagagcaagaagctcatgagtacaaacaggaagctcattagtatgagtagtcaagagcttgcctggcatatacaaagcctttgtttgattatacacacacacacacacacacacacacacacacacacacacacacacacacacagagagagagagagagagagagagagagagagagagagagagagagagagagaggtgggtgttttgttatcaggtaaatagagtagttctgtggatttcagtccacctttactcgagccatggtttttgaaaccagcagctatgacaggaagacattggagggaaagctaatgtgtggatttaacaatgagggtaacaatcactgttgagcacccagcatgccaatggtagagatagcatgaatacttaatgaggaagattggttagcccttgctgaaaaatcatcaccatggaatactctcttgaagatgtctgcaatctttatcgtagtaaaataagcacttactctataaagcatttgatcaccctgccctttgattctagcaacttcacctgaaaaatcactaaatgtctcctatgctagcaagatattataatcagcattattttaatttatatacaaatatcaagctaagtttattcaatgatgttaaactttatttactctctctctctctctctctctctctctctctctctctctctctctctctctctccctctgtgtgtgtgtgtgtgtgtgtgtgtgtgtgtgtgtgtgtgtgtctgtatagttcagagggcaacttgtgggttctctccttcaacatgagctctgggatggaactcaggtcgatagactgggtgacatatgccaagccatctcaatgatccttatttaatgattttcccctttagtttttattcaattgttaggagtttgtatgtacacataatgtattcttatcaaatctacccccacatcctcccctccaactttgctaccttcccagtttctatgtagccctagttttcctggaaatcactctgtagaccaggctagccttgaactcagagatcttcctgcctcctgcctccccagtgatgggattaaaggtttgtaccactacctggcttttttttttcatgagttcttcttttaaaattcaagtccatttattgctgcctatatgtgcataggtgtaggacaatgagctggagcaattcaaccagtctctcaggggctgtatacctgaagaaaattgcttaatagcagttggtgcatttgtgttcatgtacaggtgtgtgtaaccctgcatgtagaggctgggtgttgatatcaggtatctttctcattttctttttctttgtgtttgtgtctgtgactgggcagccctgattggtcctgaactcactaagcagaccagatggaccttaaactacctacctttgccttctgaataccgaaattaaaggcatgagccacaatgcctgtttattgttgtttttagacagggtctcttactgaacctggagcttcccaaattagttagattggttggccagcacccccatagcacactcctgactccccatctcctgcactggatttgcaggtgcacgccatcatgccaacttttatgtgggtaccatgggtcaagcccatgtgtttgagcttgtgggacaagcactttactgactgagtcatctctacagcccctcaaaaatcactttcctagtacagtacaacccaaagaaatacaatatttccatgctgaggatcaatggtaaatatcaaaagtccttgttttccgtgactaaatcatcatgtgctttgtaagagcagaatgctctgtgtgtatagataaaatactgtgatctataattcagagtagggactatctcagctgaggtttttcaggcagcctttggaggtgttgtgtgatgtgatggctggcacaatacaaaaggaagtgacaggatacaagatggctgagtgctactagaagagcttggattcatcaggcatttgatttgaaagttcaagagtctcctatagcccaggctggcctcagattacgaagatgaggatgaccctgaagctccagccttggctgcttcacctacccagtgctagctaggataacaggcatgtgctgccacacctgggcacatgttattttaatttcaaattaagcttcggctgttgtgtttggtaccgttgccaactttttgacaactgccacattcagttatatgtcatgtcaggtcatgacctgaagttcaaggatctgggctttggacacgaaagtctgtgctgatatctgaatgcttgttcctgagtcttatataaggatataatccacattatgttgaaacttaattcaattgaactgagaggtaaggcctcaaaaaaggcaactaggtcacagtgattatacatcatggatgaatttactagctttcttagtaaagtaaaggtcttagaggaatctgggcccctctgtcttcctctgcctttctggcaccagcatatcatattggacacagagtgtggaagggacctgcaccagatactcaatggccttgggctgtccagcttctagaattgtgagaaatgtttccataagtttttatttgtaattgtccagtctagggtattttattatagcagctttaacagactgagataaagctgtcaacaatatcatgattagaactgagataaactaaacatggaacaatataccaaagaaaacaatcacctacatgtcttcatgaccagctgactgtcttagctatgctttgggtcacaccttcattatgtatggtttcatatattaataaatatcgtattcctttttggttgggttacagaatattgaaagaatacttacagagaaaaggaatgagaattactccaagaaaacagaataacttgaggcaatgccatcttgtcctgatcttccttgactccatttgtgtctgctcagtcacttttcagcccccatgccctgaaatagtcatgtctaccttgacaacacattccagctttccatgaatctaaccatggatgagaagcataaccaaaatatctgctgaatgtatacccctgcaaattttccctatacctatacctgaaaatggtatctttatggtgtgttcctttataaacactctactcatgagctttggtgaccagtgttcttcgagataagagcctgatttggcaatcagttcataaacaactctaatttggcttcatatacatgatagtctgtaactttcttgccttggcattaataaattaccaagatttaagattttcttttccattcaggaaatagagggagcatatattttgttatacaagtcacaattgagttttagacatcagcatgataggctatttgaaaagttaagtatgggtaaaggagtatgtatgtccaccaggtagacatacaaaagggaggcctggaaagtgttttattgtcaactagtgatcattctcaatcctgtttttactgcccttggcattacagagaaaaagtctaatgttgcattttgcagcactcctttcattttatggttgtgggatatggcatatcccaggttggaagccaggtgagaaatttgaaaataggaaaggtaaagaagttgatttccataggttggtgagagtcttctgagactgtccccggagtgtgacagtcatctgaaatcaagagaactgactccagttgatgttactaatgtcacttccctgtaatcatcaaactccctgatttcccccaaaggtatcctttccgatttgtacgccctagccattctaatccctgctcaagcctatatctccttccttgtagttagtctcttcctatctcaatgcccgggggatatagtcaccagcctggatacagaaattatttgagtacagaaagactcctaaataaactaagtagacagaatgaagttcatgtcaaatgcactccattcataatatgatttcttgggttcttagactctggctcatctatattcccaagggacaaatagaagcagtgaattagacagaatggaggcagtacccaacagtgattctaacagtcactgatgagtggcaactaccagctatcactgtcctaacctctatacataatagcaaatccaagagttcttgcatctataggaaccaccatgtcatatacccaaatcctccaaagaaatggccatgtcacaggctatttgatgctcataatgatggtccgtaaaatcagaacatgtattgtggcttataatcttcgggtagccttggagcatgtgtttcttggacccctggctcccataatagctgcagttgagaactatggctacagaccttttatcctccagaaaacaatgcccaagaatgagaacgaatccctagtgcctgttctcacctgcagctgtcaatcatcacataaactcaactgaagctgtctaccttattctcttttacactttgaaccagtgacaatgagaggctggaagcacttcctagagaaagcaaacatggacggtcaggggacattctttagaaataacgctatatctcagctccccactttctacattcttgtctctttaccactctctaggaatattcagcggcgtctctagtgccctttcaatgttcctatgcaaagcaatacttcctgtctgattccccatcttcagtgtaactatcgaagctgtcgattcctggtttcttggtggtgttaaattatttcaaaattgtcatatccatagaatctgttacataatctctcccgtatgtttgctgaacagaatcttagaatctgagtcacagttacctgcagactgttgattctaatttcaactctacctcccagacccctggcatatggtcctcaaactaccagctgcatcctagagtcaaacacacaggcagtttgcttaccaggatctgtgaggcagaagcataggaacttgccagtgagtactcagcctgaagagaatattgaacaggaagctttcctgtgggtcagataggtaatggcagagtttgcaaaagaatacaaattgcaaaagagcacagctgaggggcagtcggagaaggcacaaggatttacagttcattttcctatatcacagttgcataggcaagatttgggacattttgacattttaaaaactgtaatgtctggttttcaagatagcataaatgtcccccagcccacatagttcacagtgctgcatattcaggtcacttctacgctgtcccagagctggcctgtgttgcctagcataaagaagtgatcagatgtgacccgaggctggatcataaaagattagttactgctttgctgtctttcttgggtcttgttttgaagggagtctctgtcctgttgcaaggacattcaggtggtcaataagagaggccaacctagagagactggaggtgttcagttaacagccagcaaggaatgaaaaactgatcagcatctatatgaactgcagttgagctgagagatggctgcaagtcccatgggcagtttacccataacctatgaggaaccctgactcaccgccatctagctaagctgcccctagaagaccaaatcttaggagctgtgaggcaaatgtgtactatattaagctattaaatttggagtcaattcctttcacagccatggataacacaaaagctgaaacagaggcaaagggtttcccgcttagggtcaagcacacattggattttgctccccttggctcaggctctgacctaccaggaaataattttactcaccagaattacttccttgtcacatcagagcctactcttccatttgggagttttgcttgtctatttgctgtttatttttatttcctattgatgttgattgttcaaagctggatgaatgagttgtgcggctagattgtccccttatcagaaacacagggaaaatgcaaatgtagacatttctgatcatgaatatttgtaaaaaatgttattttagggttctattaatttcaaaagaagggtccaatgctccctccctgcctgtagatggtgcaaggttatgtagagctctatgtggaagagggtagggggtgataattcaaggagaggtacctcctcagaaggtgagtctcagggaagatctgtgccagacttctgacaggattctgacagatgaacatcaagatgggagaaccaaacagcatcagggactcaggggtgggatgacaaagaagataagcctggaggacagaagctgaagacaggagatcagcaagaagaaagttctaacacattatcacagaagctccacggttttcctcattcttaatccatgggatgatacaggataatgatgtggttttaggaaatctgccaagaaaatgactgctgtgagaagttatgataaagatgatccacatgatatggctgtcttctagtcaggcagcctttctaagtccagaaaacccccattgattattcccaattactttttttcccttcctctagtgccctaatacttcagtgcatggggcagtggtaagccaactgctttgaaagaaaaggaaaaacatcaagggcatccaatgcactcctttctttggacaagtaacctgatagatacgagtgaaaaaaatgacactttaaagttgtgcacatttagttgaaaggaattatgtgcacatgcagatcatatacttggctcatttcataaacacagattccatgccatgcatctgagaagtgtgacattgagccaacttttctacaactcacaccattctacacatttgggaaggttaatagtagaagattccagccaactgatttgggtgatttttaaaatttgaaaattttacagccaattatagattagaaggagctagatatccttaatgtttttttttcctttctctttctctagtatcagagaaggaattgggggtgggggttgggtgggaggattgctaagcaagaaagaatggttttgctagtttgcaccatcccttttcaccaccatcttccttcaggcaaaagttagtctgtatctctgaggccggatataaacaagctggtattaaaacattctccttgtttataatttgatgatttatctatatatctttatttttggctactgtggctttttacagctttctaatttatatagccatttgtttaggctgtcaaaacatttttaattttaattactgtgtatcatgcctgagggtgtaaaactgtcagataaatctgagactctgcataaacatgtggggaactgcatgtgttatcgctcaacaattgctagtgggcagttagcaaatgtcttttcacggggctggttagctggctgttctctgtcataaaggcacgagatgatgttgtcagcctaggtgctgagcacatcattaaacacacgcttctgaccttggcacaaaaaggccaaaggtttttgatggacagtcccagactaggtagctccacagatggctaatgggaagatattcaatgttaagtcctatcagactggaaaactggaccatcaacctggtacttcatttttacaatgaaaaaataattggtgaatcagacttcttaacgaaacagtatgtttgaagaaaaatgcccacacatcttgttttatgttttgctctttgataatgtttcagtattataaatatgaataaacagtcaacccatatatccattgttcatttatgcattcatatatatatatatattcatatatccatccatcaatctggaaatttgccatttggcatcaaatgaatgagacttgatcagagcttgatgatgtattttatcattaggcctaaccttggcaaatactttatctgtagatttatattgtagtgatcagaaaagcttttagaaataattcaacaagaaacctaaatctaaaatggagtgtcaatctagaatatgtctatttattttacggtgatatagtaatatttctataattatccttttttataccaatcttaaagaagaattgatgccaggggaggttgctttttctaggtgccagaacaggacacagtaatgagcagggagaaggatggtaaagactcttctgccatctgtgcttgctggtcttttctgtcatcctggacatgcccaaggcatattactgcctcagaattcatttaagctaattgagctgtttctattcgggggcagtgggttttgaaaaggagtcaccatttctcatgtactgtctcagtcaggtagggacagttttgatattgtataaaattaacaatcagtatcaactccttcagacaaaaagccacagtagaaaagtaaaggtgtattgtgttaaaagcttggtcaggatttgttgctgctgggaagtagtaaaatctttacaaggtagggtctaggaagagaatggtagggccttgggcatgtgttcttgaagagcatttctgggccctgagcctttctgtcttgctctcactctgttttctatagttgctgtgaggtaagctagccaccccatggtgtgtttcccgtgatgcccagtgctgccatacttgcaagagccacgggccaaattaccatgggatgaaattactaagaacacaggcccaaacaagattttaagttgactcatctctcaggtgttagtcacaattctggtaaaggggctggcatggtaatcacttaaaatacaaacaaaattttccagataaagagactgatgggaatacatgcacatctgtctgttggtatgtcccacacacttttctgatggttttatagagagaccatttaatcctcaaaactattatgagaactctaacctcacttcacagatgaagaaggttaaattctctggtaaatgttacatggtcactgagcagcagggacaacccttgaccaactgactctgacactcacattcctttgtcacatgacttcatatgaaaggatctaatcatagaaggtttctccccacctgaagcccctatgcccatacattatccaagacgaaaggggatgcagctgaatcgttaccttggcatactcatcattatatctagtgtatgcaagagagtagaaggtccataaggaaagttaagaaatgtgatcctgagttactcagtgactaagagacaaggtatgaactgaggtctcctgtcttctggtcacatgccattctcccacattgcctctgtgaaaactcatcctggcaaattgctggactacaacagggttacatgaaaaaaaaaaaacccaagtgtgccatggacacactcttgctttatgtctattcctccaaactctgtgcgattatcaccagccgcagatgaaacaatgctggcagtattcatggcgtggtatgactacagacaccagccatagatgaatgacaggcacctttatgacttagcttgcagggaaggctgcaaggagccttttgtcttcggcctctcctagcaagaccagggaggcttggataagctttcttcctgctccttctagacaagcctgcaatggacaggatctttattggacacttggtgacaggtgcagataatgagcttaattctcaagagatggacagggcacgttctatagctagtagctctctgctgatttactggcctgggagatggttgttttctgaaagaacagaggggagcaggatcagaaagtgctgcagatgtttgcagcttgcatacactctgctgaccttcctctatgggtatccaggactaacccacatgatcatgtttctgtctctattacgtctctattacttaatttaaaaatctgatgctcatggcagaaaggctggtggatttgttaaaatgtgaacaaaaggagaggtgggctgaagcaatgaggcctcttacccttgaaacctcccaaatgaatgaagccataaatcttcttcaactcattttcctcctctcaaaataaattttattagaaactatctggcctttggttgtaaagttgcttggattctcttcacataccttatctactggtacatttttaaaaaatctccaaaatggattgcctgaacagctcctattaggggctggtgacccatggtagccaggactctttctcatgtgatctcctttcttcctattttctgtctgggactattctttctgtggctccagaatccatgattgggaactaaaatgctccactatcaggcttcagttcacagaagtatgcaaggatcccatggccaaggcaatccacatggtcaagactaatgacagattagtggttccacaaaacaaaacaaaacaaaacaaaacaaaacaaaacaaaacaaaaaaaaaaaagagcctcaagacaaggacatagaaagggcatgattggaaaatcattccatcaatcttctattccctcaaacataatgactacctgaaacttagggtgatggccttcctcggggctggaagcaacttctctttgctagtgtttacttagggtggtactttggttgggagaggtgtggaatgaccttgagataaattaaatgttggaaggcgagtgtgaggaactgggccctatctcttaattgcatcagcatcacttgtagttgccagttccaaacacttgctccaactaactccaattaaagggggagaatctaatttgcttcacccaactcaatggcatctagaaaaatggatttcttcaaaggcataaaatttacagggtactgatactgaaccatgggtcagtgaatgtacctacttcaacaacttatgtgaggtggagaaagtgccagcatcccatgaagacatggcatcctgggttatgaacagaaagtatccatcacaagtgactataggtagcatggagagagttcttaaaggagttaagttagttctagtgtgtggcagatggctcccaagatcctcatgcactggttgtttcatcaagcattaatctagataccactgtatctagggactttacaaatgaaatctgtgactcagttacttaatccccaaacatggggatcacatgcctggagtctgattagatcaggcagggtttttcaaaacagcctttcctccatcccttagcacaaaattaattcggtggttggtggtttaaagtttgaggaaatttaacattctgtccgtggatttgaagagcatgagggcctcatgcagcctctaggggctgagagctcaaatgttttaaaggcaaggactgaattctgccaacaacagaatgggtttggagcacatcccttcccagagcttccagatgagagcccagctggctagcaccttagctttggccttctgacaccctcagaagagaaaccagctgagccatgctggactgctgacctacagaagccatgagacagtgaacaggtgttgttgtaagctgctgcatttgtgttaatttgttaagacccaataggaaagctaaaatataggatgattagtgtttccattttattcccttaaaatgttaatacccttggagaaatggcataaattgaactctcactcatattttggtataaatctatgaactgaccgacacgtcttttgtggatggagacagcaaaattgatgagggcgatgcagtttagtcaggccagagcaaatgtgagaggtgtgaaagtgtgaatagaggtaggcaggcaggtgcttatgaactgtgctgtgtcctataaagagacaacacaaaagtagtaagatgagagatggagggggatgttgtattcttaaaccccacattcacctttcactccgtatctatgtttcttcactagttcctttaatgaaactattcgttcatccacagtctctgtccaatagttctgttctgacttcttcctaatgaatccttcagaactaaacccagttacccactcttctcttttggggccatccattcctcttggctcctatgatatggccctctccctctttgtgtctgtttgctttcctgctgtaatggacaatcaaccccagaatctattgcaagcatctttcctgtagactatttctctaagttagccctcctaagaactccactgtggccctctttacacagataggctcttttcttcattgatctcacttgctccagttgatacagatggcctgtctatgtagcaatgactcaaacactgcttgttgaaattgaaacagcactttgagaccaaggttctaatctcaactttctaccagaacattataatggactttgtgtgtgtttcagcctgttgccttctggtagtggattagcattttcccctggtgcaagaagggactttgagagcccatcccacatgaagggatacactctggccctggatacatggggaagggcccaggcccagcacaggaagatttggtggactctgcagagccctgttgagggccctaccctgcctggggagtggtgggtggatggggtgggggtggaggaggagggatggggctgaggagagggagaagaagaagggacttacatgttaaacaagcttgttcctaacttgaactaataaataaaaaatgtcaaaaaaaaaaacagattcaggaagtggagctggccctgtttgtcttacaggattggctttgggatactgggtgaatgtgcatggcaggataagtctggagctattattgttattgctatgttgcagctagaatgatatcaacttgataagctttggtaaaatgatcagagcctgaatgagagatgagcaagggagaggagagacaaattgttctagaagaagcacccatatgaaaatgaatgaatgatagtaaaaacagtagtgaaggtgctcatagacgtttgacgagctaggatttgattatctgtgtatctttttctcctagccactgttctattgctgtgaagaggcatcaggaccataggaactcttataaaagaaagcatttaattggggcttacttatcatctcagagggttagtctgtcatcctcaaagcagggagcatggtgacatgctagcagacatagcagctgagaattctatataagtatctaaaggcagcaggaagagagagaccctgggcctggcttgagcttttgaaaccccaaagcccaccctcattgacaaactttctccaacaaggccatacctttggcagctcttggccaccactaagtccgagtattgggtgaaaacctgaggatttggatgaacaacaagatgactggtccactttctgagagaatgtctccaacctttattgtggaacagccttatatacaaacttacaaaaaccccaggtgacaggttcacaacaggataattgatgctagtaagttgaggtcaggaaaacaggagctaccagtgcatatgctggaaaacaactcttcgagagtccatggggtctgggtcccaacacatacctactgcaacaaggccacacttctgagtccctctcaagtagctccactccctagtgatcaagccttcaattagatgagcctattgggaccagtcttattcaaaccaccacattccactccttgatgcccataggctagtatcaatatcataatgataaagtgcattcagttcaactttcaaagtccccatattccagtggtcttaacctgttggttatgatcccttcggaggtcaaacatccctttcacgggtgtcaaataagactattggaagctcatatatttatttacattaagattaataatagtaacaaaattacagctaagaagtagcaacaaaaataatttatggctgtgtgtcactacaacatgaggaactggattagaaaggttgaataccactgctatagcctataacagtctcaaaactgttcagaagcccaaagttcaatgtctcttctcagatgaattgaaatctcttgactgtaatctcctgtaaaatcaaaattaaaaactggactacattcttccaacagacaatggcacataatattctttactattccaaagggaggaaagagaacatagtgaggaaatactgatcaaagcaagacggaaaaccagctgggcaaactccaaattctgtatctccatgtctgatatcaaagcgctctttagatctccaacttattttagctttgttgactgcaacacacttctccttttgggactggctccactccctgtcagcagttttcctcagtagctatcccatgactctggcatctctaataccttggggtttccaatacattctagactttaccctcaccgcttcacagcattctagactttaccctcacagcatcctctctggacctccatgcagggatactgtccctctgccacacacctagccccagtggctttccttagtcggggaaggagattccattacccctttcttgaatacttgattctaaagccagaaacaggccaaggctgccaagttctgctggttgctggggctggaacatggcctctcattcaattacatgtgcatcagctttctgcttttgatggtttcctttactgcttaagctttcctttaatttctttttacaagttggaagcttatctgggtgaggtcttgccctgaagttaccattccttttattccatttagtatcaggcttttctctaaacttttttgtctccttgagcactggatttagtgctattacacttcctggtgcttctttttcctttaaactgtacattttgtatttttccttgctcagcttgaaggaagcctctgaacacagttccagtgtgatgacctcaaaatctaggcagtgacagaattgagacttcacccatcatattcccatggtcttaggctgtctgcccactggatcaattctttcctaattgtgatatgacacttctgatggtagaacccatacttccagaagcatgtaagaaaatctgaacaaatagaaggtatgtattttagcatgtgctaggaaaaataagattagaacttccactctatgtttccagtgttattatttcttagggagggtttaaaacatgtaaaattacattaaatataataataataataataataataataataataataataataatagtgtagagagggaaggagcaaagttgaaagcttgacatttatcaaataatgtgtgacacagggctgtgggtgttcatagctcaatgagtggttgacacacacagaaataactatggtgcaagatgtgggcatcttaataaagggtaaggatacatggttctaattctacttgtgcctctgctgaaagcgtgacttctgtattgtgagatgagagggttggaattgaattttccctgagcagctagcatatggttgtgcatatcttccagagaatgggcccaagctccactacagtggatttcagcatcaggctaagctgagagattctccctcctcttctgtcaggtgtgtaaccttgggcagggcactgctctgctctgcagtgtcttaatttactaacttgagataacactcatctcatagttctgttttagggatcaaatgagtcaattaaagaaagtgtttaaacaagctcctagcataataaacactatagaattatttattgttactatttactgcctaggaacttcaaaccaaaggtctattatctaccttggagaagcccagaaggagttgcatggataagtacccattaaaaagtcatgtggtcttagcttacttcaggaactttctaaccatgtcagaaatgacaaaatgggtaatggccaaaagataagacaggaccagaaaaatggaggaagaaagcaccatgaggtgaacctacattgatccttagagaataaatagtatccacccattcagcatcatgtataaattctctttactctgtgtcctgatcacatgcaggacagggccaaggcaagtttgattgactactgagttggaaggtcacagacctaccctatagggatatgggtcaacatccactcatgtctgatctctgttggcagacctgggggaaggtttcagaggagctgcctttatgtctgaggggtggacatgggtttcaaactctctgttttcacgtgttgagacaagctttctgtgttccatgccagtggctcttgaatagatcacgtgctactctgttaaacagatctaaacatagtcactctcttcacatactattaaacacagctacattaaagcaatgtgtaggttgagacaagtacatcccaccataagataattgggagtgaagtcactgtgacaacttgagtaactaaattaaccctaccaaaacctgttttcatggggtcaaaggcttttcagtgggagaaatcaggtgtaaaagaaagcactccactttttcaacaccttgtaacacccgaggaaacacaagccagaagcagcaagtgatctgacttagctcagaaagatggaatgagttccaaacagcatcgagctccaattcagattcttgtagctgtgaaaggacatttcctttcatttgtttctgtcctgatgagagcatttaatggtaaatatgcaatatgctaaatgtaacttgctttaacaatgataaataactggaaattaagactgggcatggtggcacacacttttaatctcagaactttgaagtcagaggcaggtgaatccctctgaatttgagaatagccaggtctaaaaagtaaattccaggtcagttaactacataacaacaccctgtctcaaacaaaacaaaatctataaataaaagagtctaactgaacaatgtgatttaatagctgatttactgaaatcagaaataaagaatagtgttaatggtattgaatttgtgagggtgggtcaccatgaacacagagtgtacctctggagagtttttcacataaaacccaatactgtacagtgtataatgtgaattctcctgccccattcctcttcctccctagaggagtgacagcgacttcttacctaaggcattgagctacagggatatgagctctttcaggacagggatacctgcagactggatttgcactcttctttctgctcagcctcatgcaaggtagtccagagtgacagtaagcagatattcacatgtaaatctatacatagaaatcatatttttatattagggaacatctaaataatgagttagagagatgacttagtcagtggagtgcagactgagtttaattcccagaaagcacattaaaaattaatgaagcccaacatgttgacatttgtttaggatcctagaacttggcagtggaggtaggcagatccttggggtttgatggccagcaggcttagcccacttgaaagttctgaacaagagaatgattctgtctcaaaaaaagtatttggtacctgaggaatgacacccaagttattctctggctttcatgtgcacacaactgcacatgtgtctacacataatgctctaaactgtaccttcatacacacatacacacactgaaaatttaaaataaaaataaagcataaatgcttgcagcagagatggagtaagtataatatgagctgatgacacaaaagaatataatgtaacatttaaaatgatgctatagaggaaaatctatgcaatccctcaatacatgcttactattcatctaaaagtagctagtttagaacaatattcatggcattactgtaattctctttaagtattttgggtatacagatattaaacaagactatatacaccagactataaacactataattattattgccatttacttttattttatatttttctaaaacaagaaaaattactacatgtaatagtacattaggaatatggctgtaagaacaagcaagatgcctactatcaagaggaaacagatttttttgaatgcccattgagaggaaatccaaggccaatgggctttcaatttgatccaaggccaaattggtattgagaagcccacattggtttatcataaataatctgaactatttagcaaaacagtgtgccatgcctggaaaaaagtgaacccattgtccctacaagtgaatatccaagagaccaaatgactgtctacaaatagctaacatggtagaaatgaacattgaattctataagcatgggacttgagaattcaataagtttattggctgagggtcctctctttgtgttccatttgttaagatgtagctgtcttttccaacaaagaatggtttccattatatcttctgaaatacgtttgttagtgagattgctacactgtctaccttaacttattattctgtctgcatgattattacctccctcctgacagtttctgggtcttcaagaatggtactatgttcactatggacattcttatgatgggactgggttttttagcagttgagagattcccttcattaatgaacaccaaaggtgccccaaggaaggcagaaactagaggagttcaaagagccgtggattagaggagaaaaagtcttccatatactcttgattttgctaagacttgttctaatagaagtgtcactgggtagtcaccagtttctcccctcatagtgtcacattttgattgacagcaaattacagtatagttctgataattaatttggagccatttgaaatagtttaagtgaacactaactagatttacaatgtgaatgaactttgtcagaccagttaaaaattatctttgaatatatactgataatggattttgtaatttttctgaatagggaatatggatatactctacaaagataatacctcgtctagttagaaataagattaggtaaccaactcaactctctgctgagtttgctacatagaggatagagtgagaaacatatttggtatataaccaggtgcataaacactggcttggaggagatcccagaagctgccacagaatgaatcaaactttaatgcttgtataacaacatatttggttaagtttgtagaagagtgaaagtgttgagaatgcctatttattttgtgacaaaattctaaaattatttaagacgtacatgttctctttaatgaaacaacatgggggaccagttcaaagccacccattgttcatttgtatgattggtttcctggaatgctttcgaatgaccatctggaccttctcacaaagagtgaaaaaagagaaggattaagattacaaaaccatcctaaactgtgtgtgccaccgaaactgaagtcacactttcaggaaagactgcttaaatatcacacttctcccactgccaagaactcctggaaaatcatgaggtaagcggattagagagcaggcatttggcatgctccatcaagtctgctgaagcccctttgagtaatatcccattccattagccagtcaatggaatgggaataggagagtgggatgggatgctgaccaataaaacagaaggtcagtctagggaggtttcttctccgagtgcccagtgtaaaatgctactggtaacacatttccagcttctttctttccatctttttttttttaaacactgctaagcaagtctccaggacaaagaactctgatattctcttttcaagtgctagacaaattgcacattctcagaatgatacactagctaattgggagacagagcccagcaactgtggtccttctgtcttctgcttccttctcttgtactctccaaccagtgtgtcagcttcccgccatgtctaagcctcagacattctgaagatgtagacaataagggacacagagaggcatgatatggatagaatgtagcaggacaatgtgacccatgctttgttaagaaaacaagcaagctgccagcttttgagaggaaaaagtagctcagagaggtgctcttatggccccatctccgtgaaagcccagaactgggaagatgaaaaagcaatgagcatgctaaaggctgaaaagccacaggaacatcagactgatccatttcactgcccagatgtctatataaagacttttagttaaaaatatgttttcatagaaaagcaatttattccattataagcacttacacagttagtcatggagagtaacaggcctgatggtgagacaggtcaaccaaactggaaatggcatgaaactgtagtggtgaaggactaactcctaaaaaagcaactcttatcaaggattaatttaatttttaaaacaaatacaaactattaatacactctctggtatgtggtatgacagttaaaaacatacatcttacaacttggtggccccaagttcctgagccaaggtatatgggggtgcgcctagaccctatcctaaaggagatgatagactctgatgacccccccccatgaaaggcctcaccatccctggagagcagaaaagatatgtgataggtagggtgttagttgtgggggagtggctgaagggaggaggggagggagtaggaactggaattgacatgtaaaacaatcttgtttctaattcaaataaaaaaagaaaaaaacagaaacaaacaaacaaacaaacaacccacacaacaaaagcatttcacagaaaggcaaagaataatatggaaacagctcaagaaatacactaacgagcaaaaatataagggaaggaggaaggtgtggtcttaactaaagaaaccaaaagtctggtttacacaggaaaatgtgcattctgggagagaacattaaaatctatgacttgaatctcccctaattcctgaataaaaatgacatcttgcaatatttatatgcatgtttcagacacctaattcacttggctctacttccttatccattctggcctcttacttgagaatctgaaaaacttggggatatagcttaagaagaaaaacaatcagacacataatatgccccatttctgaagctactttagacctgggtttgttactagaaaattcctgaagaaaatttaaatgtaagcctgtggctttgttgaattgagtcccgcagttaagatgtagaaaacacccatggtttgggctaatagtgttgttggtggtatctattgtagctgacagctgaagaaagtctgcttcaaaccagtgttaaatccacatcagggttcagaagataacaagcggagtctaaatcacaagtgtaggcatggctaggatccttgtcttctggatccacactttcttcagggccttcatcattataaatgttctctaccatcggccacacttgcatgatattgtcctctgatacagaacaaatcacccaaggttcattgggattccaggagaaatcaggtatcttggcagagtgaccaccaagaataaacaactactctggtgggccatcttctgcatgttctggggactgttcttctccaattttaatttaatctcagacattcagcctatgatcagtaccactagaagtcaaaatagtccattgtgaggtgaccactgaacttggagtatttcatccttatgtgactcaaaggaatgcaacttgagtttcaggtttctcagatcccacaaggcaacagtcttgtcagattatcctgtggcaagaatgaattcactataaggattggaagatagacagttcacttcagcagggtgagagcatcaattggcttggaagcattgtttgaacaagtatcccaaatcttaagtttctgattgtcagcaacagccccaaacagagactcatggagcagatgccaggaaacgtcctccactgctgctgtatgccctgtgaagatggtctttgcatccaccacctttccttctttaggaactgcactgatgtcatataggcagatggtatggtcatctgaagcactaagtaagtacccactgagatttggattccaagaaagaccatgaccttccttctgatgtccatggagacataaatctgggttgcactctccagagggtctggtttagaaggatgctttgtgtagtcaaaaacaggcacatcagtggatggagtctttgttgcaatgatgcaagggttctgcagaatgtgtcaagccctgtttacttctcctttgtggttgatcttgatttctatttcagtttttccactgtcaagtcaaaacctctaaattctccttttacactgtcatagtgtgatgcatcaaactgatcatcatcgttaggaagctggatactagctatcaccaggtggttttattcatctgacgtatgcattcccaggacaagccagtgaatgctgaaatcttttccttcaggtctggttacttctggaagccattgggcacctaaactgggccacttcagggaatgtttcttcaccaagtcataaagaaagggggtatccttccatattttgtactcctaattgatcacacgttcttccaccatattgtcaaaggcagcttccttgtcagccatggtggcatgccacctgggaggtgttgggggatcccaggatcatgctttgctggagggggcgggaggctacaggccagttaaaaatattttagtgccaagttcttttcattgctttggctgaaacacaggagaggctgcagcatgtatttggcatctgggccatctttggtattctaatttccctctgcctagtcgtatagccagcagcagaactgatctcaactaagggtgttgctactaattgttagtttccaattactagttgttcaaggtttatcaagtattgcgactttaattagggccctaagatgtaaactgcagtgtctttaacagacacattccaatggggataatttgatgagacagttcctgttgtatagtaattgggaaccaaagagagactcacatatgaatagtaaattaagatgcacagtagtggccgggatttatacctgggctgtgagaggccttaatgaccccataaaagggaataaggtcatttgttatttaaaggatcataagatattgcatttcataaggatattgaacacgcacaaggttaaagcgctcatgggtgatccacatccccccctctattccattataagcagaaccagaagagttagcacatctttgtaataaagccttaaattccagagcgacctgctgctattctacctctcaaatcccagaggacagctgctgctgggctgggctttgtaaaatgttagtttcatccccaaactcagcataagcattgaatcttccattttcgaaccaattagagtgaacagtctcccaattttctgggacagattgtcacatgtggccaaatgggggaacccagaggtctgaaaaggtagcaacggaaaagcctgattttggtatgtctcattttaggatgaatacaaatataaacatctcggttctacagagactataaaatttgtagtacggtcagaaaactctcaattatccaccaacacaaagagataatccaaaatattggcttattcaatgtaaaagtattggaatttggaatatgttgctgtaattagtctgcatcctttattgggtttcttaggcccttaagaatttgcttttgttcccttttcatgcacctgaagtttaggcattattgaaacaataaattatgaattattataaaatggtataaaaataacaagagttcatgtatctacccttcagagtttcaaactctcctgacaatcattggtcaaggtgcagagaataagagactgtaagatgctcaacccaaatggtcatccatttctcaacctcttctcccaaggctcggggaccactttgggaaagtggatggaacgattgttaagagccacagttggttcatgagtacaaggaaacagtgttctctggacacagcatggctattgcacatatgaactcccagaaattgtgaacgcatggcagggcttgtgcaagacaaagtccgtcgggggggggggtgtggacatgaagtatcatcctatctgagaaactgttggcaactgatagatgccagatggagaagagtcacttttctttatgaatgtggatggcctctggtgtgttgactatgctctaggagaagataggagaagagcatacgtctaagaattgataggtaacagaaactatatttgatgggcttaagggcaaaaataaggatacaagattgggtgagtggggacatgggtggaactaggaggagtgaagggagggaggtaaatatgctcaaaatacattatatgaaagaaggactaagaaaaaggtgaagaatctgacttaaaaatacaggtgtgcctatggtagattacaaaattacacagagatgcaactgctgcctcttccttcaggcacataccttgtacttgtcctctacatttcttcccattaagaatatatattttactatacactttgaacatggcctggcctagtggacaggtctattcagtacaatgtgactttgtggtttgatttggccacatcagggccaaggctgtgccttaaaagaagtcttgtcaaagatgttagtgacaactgaagccaacaaggatagaaaattcattcaatatatataataaatgatgctgggataattaaccttaaaatgttaaagaatttaaattatatacccctttacctcatatatcaaagaggtaccacatgaattaaagtctgaaatataacaataagtagttgacaacatttctaactgtatgtttctatttatcttagtgattattcttcccccctatgtctttttgactttaaataataatagcccttaccacttgacatcatcaccaactgtgctatacataatgctttgggggagataaatgctttgatgtattttcttactggttgctttttatccctatttatctatctagtcacatagagcaggagttctcaacctgtgggtcgcaaccactttggtggtcacatatcagccatcctgatattcgcattataattcataacactaacaaaatgatatttatgagatagcaacagaataatttcatagttgaggggtcagaacaacatgaggaactatattaaagggtcaccacattagaaaggttgagaaccactgacctagaaccaggaattccttattctgaggccaacagaatttaggttgctaaaattaatggaatcaatgcagatagagtactactgcacttcatgaattagtaatatctagcaattccttggttctgtatcggtctcctctgcaagtacatctcaggctcttgctcattcagccttctgtatactctggccttaagaattttatttattctctgtttattatgatccttgttgcggccatggacaggattctctgtaatgtgtcattagaatacacagctctatcttctattttaattcagtaaataattattgaatagctactaagtggtaggtactttgttagacacaataaagcaatgattgaaaatccagtagccatttgccaacttctagatggcttcatttcccccaacctccctcatttcatttcagagcaacaacaatttccacaaatcatgaaaagcaaacaaaaatgttctaaaatttcactatgggctgacatagtgcacttcatgtaaagtccattagctttccttctcaagtgttgatattattaatttctattctcatctattttaagttcttgctgtgaagattgaatatgttcttgtttgtgaatttcagggactacataaataaaactaaaattactatactcttattcctccagggaaaccctccttataatttagagattattgctttctctgatgcaacccccctccaaaaaaaaaaaacaaaacaaataaaatccagactataacatctgtggccttaaaccctctatttgttcttagtccatgtcacctgctgatctctagcttcttaattctcgccaatctatctcccctcatgcagaagaagatcaagtagaagaccatggacttaagtctttactcttctatcacgtctttggcaacagaggggatcaaactcaaggccatatgcatgacccatgtttattcttagttgtcagggagagaggatgcttctaatctaaggcaaagggaagaggtcagtgaaaatggagctagtttttggagttgttgcctaggacagatgtaagtagcaatttcctgtcttggagcctcttggtcccaaatacctggcagccgcttcccaaattaccattcagaggcttaatgcttatgaatgcttaaccaatagctcaagcttattattagctagctcttacattttaagttaatgtatattccttatttatcctgtaacgtggaggtaccttttatcactacggtgcccatcttgctttctctgtgtctggcctgcatcttctgactccacccttctcctttccatcatccttagtctatacttcctgcctggttactggccaattagcattttattaaaccaattctagatctttacagtgtacaagaggattatttcacagcagagggaagctttgttcctgtgataagcgcttaccctatgaccattgcagatttggtcaggaaagagtaagaatggaaaggttacatggcagaggagtaaaagggaaggacatgaaagacccaagcagaaccttcacaatcctcagagtatctggagagaggggtcctggttaaggagacagactactgtccagaggaccagaggtccagtcccagcattcaagtctggcagttcacaactgcctagaactctagctccggagtctctaatgtcctcatctggcctccacgggcacctgtaaacatattcccatacccccccacacacatgcacatgaataaaagtaaaaataaatctttaaaaagcacccattcatctctcatgttctagatattcattaatgattactgacataagaaaaaaatacatgtgttttctatgttgttaggttaggatgtggagaaacaagcccaagcatattcagtagagtacattccattgggtgttagttcctctcatagagacagtatacttgcatcttgtaaaatgttttctttagccagtctgaggaaaatatacaagttaaatataaacagcactcattgtgcttcacaatagatgtctcaaatgggattttcttctattcaatcagcaaagacaatgccacttcagaaaagtttttgtttcttttttatttttattgttgcttttgcctctcactatgtagcccaggttggcctgaaactactgattcacatgtatcagtctcttcagggatgtcattatatagttgcaaactataaagcccatttttgtgtttttatttgataaatatattttatccaagttttatacatgaaggtgagtgtaccatacttatcacattcatttacctgttaacttctcttgtcccctctctcatttcctcctgttctcaaccattttatatagttattttaaaaaatgtgggtttgtgaggcctccacactgacaaccacattcatggagtctggatcagttccatgctggtttcccagtgatcagtgtgggggccaagagcgccccgttgctcaggtcagctgtttctgtgggtttcaccagcctggtcctgacccatttgctcatcactcctcattctctgcaactggattccagttcagatcagtgtttagctgtggctgtctgtttctacttccatcaagctgctggatgaaggctctaggattctatagggccttttatagtagatcagtacttatccctagcataggaatggactttgggagcccatttcacatagagggatactccctcagcccagacacacgggggagggcctaggccctatcccaaaggatatgacagactctgaagaccccctatggaagtcctcaccctccctggggagcagaaagggtatgagataggtagggtgttagtggggggcaggggaggaggggagggagagggaactgggattgccatgtaaaacaatcttgtttctaatttaaataaaaaacctgggtttgggttaaaacaaaaatatgtgatatttgtctttgtaggtcaggaattattattatttcaattagcatggtggtcttctgttccatacattttctacagattatgtgattttgtttttaatggtagaataagacctgactatatagatatatcattcattctgcactaattcatttaagggaatgttggatgattccataagttgctgtggtgatatattgtttatgatttaataaagtcaatgaagatcaaaatgcaaagtaagccacagccatagagccaggcagtggtggcacacacttttaaccccagcactcaagagagagaggcagatgtatctctgttagtgttcaaggccacactgagctaaatgaaatttatccaatctaaaagagaaatggctcactcaaaggtgatctctgcacttgggatcacacaccttaatcccagcactaggaaggtggagacaggggtgatatggctggggggagaggagtataaggcaggaggaggcaggaactcagaggattgcagcctgagacttggtagagagcagtgcaatcagcatttcactctgaggattcatggagccaggatcatcctttcagtccgaggtagaggtaagagctggtggctggttgctttgcttctctgatcttcatcttgaaccccaatatctgtccctgggtttatattatttgtgttataagttgccattataaatagcacatcagtaaacatgaatatgtagccaggaagagatgttttccttgaggctctgttaaaatcaacaaactcatagagagcaggtttcatagcatatccttctcaaattctttgaagaatcagtcctagttcatggtaggaaagtttggagtgtcctggggaaatgggtgacacacgggggagggcctaggccctatcccaaaggatatgacagactctgaagaccccctatggaaggcctcacttctacatgctgaagcaacacattatagcctgcactggaagatcactggcagtctctacagcaaggacgacaaatttgtctggtgtggatggagatttttatgttatcatatcagttttattaacagagctcagagtcatactcaagagggttgtgaggtaggtgacaaaaaatatgtggtcactgaggagctgtgtggctgtgtagtatatgctttccaggtttctgtctcagtcaaggacttgctgacccagctgcttggaatgttctctgccctttcagggatcacctctactgcacagacatggcttatttaaagccacactccatcccaaggataacccatatccagtggctttgggagattataatgtcgggctatcttagcctatctgaaggctccaaagagttagatctcaagtgccagcagtggtccctcaagaacctgtactgccatctcattttttgtcttctcactcctttttaccttgagagacaccccacacactgaactcaattttaaggatctacttttttagaaatcttgccaaaagcacaagagaatttgatcagtgccaatttgtagcatcaatataaatcaagagtgaatgatcaagcagttcagagtaattgctcctgtagtaagccttgatccacttttcctatttaagtgttagctctctcattaggtatcccacaatggaaggaaaggcagagacccttacagtttagaccctgtacctgctagcaggcacgaatgacaaaggtctatcagttcttctacaagcaaagtgatagctgtgcactgggcaactatgagttgaggaaaagggaatttataatcatcctgaagcctgttgggtacagaattaaatagattgtagtaccccaaaataaaacattatcctgatgaccctgtttggtcacagagaaaccagctcaggggcacaatgttggccaggaattccctgtatatcttatgaaactacctgggagtcatttctttggtctgtgtaaactagagtgaagtgccagcttcactttaagtccttgccttatggagcatgatttatcagggttgagaaggccaaagagagggctcctaatcagcagggaaaacagtgatgggggatgtccttctgtatgcttcagatatatgtttctcttatttgtggataaataaattgtgattgtccagtagccaggcaggaagtataggcagagctatcaggctaggagaattctgggaagaggaaagcagagaagagtctcaagagagacaccatgtagctaccatgatgataggacatacgggcattctccagtaagataaggccatgtgggaatacatagattaatagaaatgggataataattaagagagagctagccaataagaagcctgagccagcagctaaacagtttaaaattaatataagcctctgtgcatttatttgggaataaatctcaagggacagaaatttccatctacaaaacagaaagggttagatatcaatgccaagactgtggaaattccaatttctagcacaatattccaaaacgtcaaataatccccccccactcctagttctgtttcctgctgcaaaacctagataaatggctgggcacaatcataaggctaaggaagcctgcttccagcaatgactcatgtactctttcacacattgacccaatccttaaaaacaactgattactttaacaaagctactttttattagagtaaaatattccagttagcccatgggcctctttcttctaatagctatcctcaaggtaatcaatgacttttaacagccaggttccgttatcaatgtaggagagtaggtttattgatttgacacatacttttcttcactgggcaccaattattgcaatctaaattgtgctacattaggctgaaaatactgtgtaatcttgccagtcacttaatgcattctgctgattggcttcaagaagctttataatcacactgttgatttgtgagttaacaatagtctagattccactgagagctgaaggctccttctaaaaggttaatagaataagacattcaagctatctcattttggtgagggtagatgaatagaaactctacgaggatatgtaaatcttgcatgcatttgttattctgttggaaactagtgtggttcttaaacagaaaaaccattgaaatagaccctggaaactccatcaaaaatgcagactatttgatttcataaacattcctaattttggaaatcattaaaactattaaagagacatgcctccacttctgattaaaaatggggaaaaatcaagactcagaatgtcattaatattattaacctgggaattaacctacttgcttaattaaaaacaacaatatattttaaaatcactgaaggctccaggctgctggagcagcctcaggctggacagaggttatgtgagatccattgtaatgacacgttcttatgtcctgaatttaacctctggagacacttacactctgttactgttgtttctgtgacaattcaatgtgattgctacaattaagctgtgtactcctctctaatctgcacctttctccttactgtctgccttctttctgacaatcatcaattcagcaaacaattactgcacttctataatgtactagaatacaaacgagggtgaagaaatacagtgaacagcacagtgctggaaatgaaagtatctcttctttacattagttctatcattcaaagctttttccaaacaaaagtaacttcactacagccagagggacatggccatggatattaaattcaccttgattattgttgaagaaaatgattgcttggggccacattctcatcttgactcacactgaaagtctactgggtcttcctttgctttgtctaataaattttgtatgtgtgtatgtagtacatgtttgcacacatgtatgtttgagtacacatgtacatgtgtatacctgtgtgtgaaggccagaagttggtcagtcagctctctcctctgtcatgtttcatttgatttttttccatttttcatcctttgatagtttaatacatgcatataattaattttagtcatttctcccctacttacttctgtcatccccctccaactattattcaaatcctacccctttctaacaacctttcctctgactttaatgtcttctttttctgggtgacctgttaggttcaactgtagttacctgctaaagcatgggtctgaagttatttgttggagtatgcacaccttatttttttttcagataggttctgtcactaaacctgaaccccatcaatttggccagactgactgccagcaagctccagggatctaactgtccctattctctctctccctttcccagtgttgggatttacagactcatgcttctgtgcccagattttaatgtaggtgccgtggatttgaactctggtcctcatgcttgtgtgatttttacaaactggctcacctccagagcctcctcccaaaatatgaagtattagaatttctacttcaatgtggaaactctgcagcactataaagcttaagacagagaaaaccagactttgttgatgcagtattttgttaggagaaaagaatacacagttctgcatagctggagctgttgggtcttcactaaaacagtcagaatcaaaagtcacattcaatgagatctgcataggttaataaactaataaacttgggtgttcatatgaatgctagaaatatctatagtaactgactcaccctaaactatggaattactatcatatatatatacatatgatagtaaactaaaagctagaatatatatatatatatatatatatatacacacatatatatatgtatatatatatatatatatatatatatatatatatatatggtctaatctagcttttagttctttctcattaagaatctgacaaaagaacttttgttcaagtatttttgtgtaatagtgtaccctgttctagccaggactctactgccagtgtgtaccaactaatgaaatacagttcacatttcatctcacaacatgtctaccaggataggtcacctctttgccaaaatccatattgatttctattttcagaaacttcatagtcttttgtcagctgctcagtgcaccctgtgaggcttgactgtgttcacgtgttgctaaggagatctgttcagtgctagtgtccactctccctataatctggagagatgtctatgatctgaaatactcccacaattctgaggattccatgtttcccattatgtaatcagcattgtgtgtgttatggccctggagttgacctggaattcattttcccacataggtggagaagtgtacatttgggggcttggagagtgttatcattatggaatataaatgaattaccaggatctccaccttttctcctagaagtattcaccatacagaacagaacttaatcatagagtagcataaggaagtttgtggtagttgggctaggctaagattctggatgagtgacactaaaacacacatggggatatacaattgtctcaaatgcagtgggagtctgctacttctaacacaaatatctgaagttggtgctcccagttggtagtggtgttgcctatggctggaccacacggtctagaaggatgactggagctgaagagtacacatatgtcagtaagcaacagtggcacatgtccttagaggaatgacacatttgttgataaatattttgggtttattttccaattttataagaatttctgagtctattagatactgtcactatattatgaaacaagccaacaaaattcaatagtttgcagtgggtggggcatatataaatgtctaaacatccatgaaaagtattacctagaaatattctctcaaaacaatcataagaagcaaatagtcatagttaaatcagagtatatataacttagtaataatatttcctgctaattgaacttgtatgagatatgtctcatgcacagaactttatgtgtactatttttttttaagtcatcacaaatcctggttatttttgatccattctgtagatgagagcacctgaactggctttcctagagttatttctaatagggaaagataagctgggatttgagcttaagcaattatttccaaatgctatatgctgcattctccccttcagtaaactttttcttctccaagtaataactctgctgtattatttgcttgctttggtttgtttgcttttttgtggtgatagggatagaatctaaagtttcatacaatttcccctgcaacctaatcacaccccacgtaatcctaaccttttgatatttattagcaagaagttttatgattgattcctttcttaattatccatgggtcctggaggcataggcttcacaattcattctggcctggaaatctgtaatcataccatccaattttttatataagaaaattgaaagtaatttaagtcatgtcataagccatcatacaatcatataggttttatgtgaagaaacttttgtgttacatatgaaattagaaggataagaatacatgcttaattctgagtgaggtaacatgggagtgaatatggttgaggcataggttattgtttgagttttagattgagtatgattaagcattgcattgagtatggttgagttttagactgtatgtgggttgagctttagattattgtttgggtttcagattgactgtggttgagtggacttttagttgaagtattaggttgagaatggttgaatttcagactttgtgtggttgaatgttattcagaattcaggtggctcatcagtagggcaattatgttttctggtttgaccagcatcaatgcagactatgctcttgtacccaattatatatgcatagtatctcttgcttaaaaattatcatacgctctcatccaaatgtttgtgcccatccaaaatttacatgctgctattccaagctgcaggttggggcagtgtagtaggagatgaggactttggagcatggttagactatttataaaaagccccttgagagctgaccagcctcctgtgtgaggttacatcaagaagaccgatgtccacaagttgaggagctccccagacacagagactgccagcatcttcaccatagactctccagtccccaaaaccatgtggatgaaattttatggggtgtttataagccagagagtttatagtgttttgttagagcaacccaaatagactaagttctgtctgcattctttcggtcaaccacccctttgtgaacaaaaacacatcatcattcttcagggtctggcacccaagtgtggcacgtgaacttggctttgcattggaaatcacagcctcgtgaaggcactccgaggaatctgcagagttttcagctgcctgtgcctctgagtgagtttggagaaacagatcagttcaaaatcactagcctctcagcaagagctgcagggcgatcgattccgaaagccgcatatctcagctggcagacaccatccacacactggcttcttcacatccttttctccacatgctcccatctactctctcaaacagctattaacaataacttcaagaagcagtgggaactaatgacaagtctcatcccctccgtttaataatgcagtcctaattctcatgttttcattatcccctggcaccaaaccatttccatttgcacaccaaagcaatcccccatatctttagtgttaatgtcagcttgatctgcactgatcactttcattaacaatatacatttacagggtaatgtgatccaaaaacagatgcttcccagataaactactcattgtattgacaaaaagacacaagcaggaaggtcaaaggcccttgaagttttccatttaccacagggggaaataaagaatgactccttaattttgttattcactcaacaaaattagtggctatgattcaggcatgtgataactgataggatacaatgacaagaaaatatgacactgactctaaagcaggtgatgaccttcctagtgactagggttagaactccatatttggaaaaatagaaatgtgaggcctagatcctgatttgggtctcagaagctctggtctgtatcatggaggggctggtgttggtccactggctacagaccaaagaagaaagggagatcccaacaacaaagaaggctaagtataatgttaagcctacaaaactgaagtgatttcaggagggatttgtacaggcttgctaaagctgctgtaacaaattccatgctgcccctggcttctggggctttgtgggcagtccctagtgcttctggtcttacagaaacactgtcctggtttctgctttcctcccagttttctctccatgagcctgcttctatgacccaatgttccttcaaagaaggcactagtcacactagatcaggacctattataatgacctcatctttatctgagcatatgctgaggtccttcgtatgcagaaacacacacacacacacaaacacacacacacacacacacacacacacacacacacacacacacacacacgcacgagtgcctgcacgcatgtgggggtaggctgggcacaaatataaccgaggtgcagtaatacatacacatgaaaatgtcataataaaacccacttttttgtgcactaaaaagtaatgaaaacatatttttaaaggtcatgtgctaaggtattaagggttatgacttagaaatatgattttcgagagccaaaattcaactgatagtagagcggagtaaagagacagaaagaaagttgacaataggaagaaatgcagaaccaagatgacccgggatgccggcaaagtttgagcagtgttgccgggcactgtcatgaaagctgtttaggtgggcaatccattctatgagcgaaactagcacattttgtggtggtttcctgagatgcctgacagggattttgctgggttacacaccaaggctgtttatccaatcccccttttcatctgggaccccaggtttttctcagcttcagtcactcacaggttctcaaatcctaggagctaatgttgcctctagaacctaggattgtttctggattaaaatgtaaaacatgttcttcccttcagtgtcaggctgcaagtgctggaatgtctcctgtgtgaaagtcctcttcttgtgttctccttttcagcatcatctaggtttcatcgctaagaaattctataactgaaaatgtcctactgtttcatctcatttgggtattataggcagagtctgtcctaatactttgtggtattgacacattgcgccactcaatctgcactcccggttgcatctcaagtggctgctctatgccccagctttgttgacatcattccaagagaagtcagtgatgctcagagtgtggtctgaaggttagcagcatcagcaccacctgggaatccattagatgtgtaaattccacccacatattcttatcacccccagatctataaaatcagaactcctaggggtcaggttcatatttctgtgtcacagtccaagcagtggttttgatttccagatcacttccatttatcagttgatctggtacactggcttcctagctcatctctttgtctcttcaccatagaagaaccagagtagccacttcaaaacttaagacagagcatctcattgctttgcttaaaacttacaaaggctttctattgcatttagaatgcaaacaaaattctcttcttaacttggaagaattctttctattccacctttcccctttgctcagcacactccagggatgcttgcattttattgacaggagatattaaggtggctttgtttgccttgtatccatagtacctgacatacaaaagagacattcactattcatgcataaatcatttcattagtgaagacattcatatttgtcttatctaatgtttaagatttttctgaatttaaatttgctccttcttaggtatgtctgtttagattctaaagattctcacagtctcattctttcctttccttttcttttttacttataattttagatggctccaaagcgccatgcttgtaaactccacaaaatataacacatatagttgtactacaaaagttctcatccctaaaagccgaaaatcatacatgtgaataacctcattcaaaagcctgtggatgattttagaaatgagtcagtggttaagaatgtctgctgctattgcagagcacccaagttggtcccagcatgtacatggtggcttataattgccagcgactcctgttccaggggatttgatgtcctcttctagctgccatatatagcaacaggcagatattttctcatacatacatacaatcatgatcatatataaatgaaaatagagtttttaatttatatacatgaagattactgttgaactgagcctgaaacaaagaaaacattgtccaaggagaaaactgtgagaaaattactggtagaggaatagcatgtacaaaggctacaaaaaggctaacagaagttcagagtattttggtcctgggaaagagaatgtgtccaagcggctaaagagccaggagagaacacacctatggttgtgaactctgaaaaatctagattttaatgtgttctagattttactgagcagcaaacggaaagcagtcagaaatttaaccctggggctatatttgagtttacagattcctccggaggtaatggcagagggggtgggttaaagagtcaaggctaaagaggcaggaagtccctgcaggttttcgtgactgacttctttctttttcccacctttggggcagggttggtcctttattgcactgggtgaggtgctattcagcagtggctttctattccccttagttgctgtgggcagtcctcttccgtccatttggcaactgtgttaagcagcgtttccttgagtccactgtatactgcgtttacccagtggccctcctgtgacgtttcttcttcatgataggacacaagtcctcttccgctgcttttcatctaccagctgtcacttcctgactgcttcctgatcaacctagaactaccaccttgtgtacttaggaaggaccctgatgtgtatataacttagagctacagagatggctcagtacagaagagcacaatgtgttcttgcagaagacctgggcttggttcccagcatatccatggtagctcacaactgcctgtaattccagctccagcttatcaaaaccatcttctgacctccagggacactgcacacatgtggacaaactcacacacggacacataattaaaaagagaagagttagatcttaaatctgtttaaaataaacgaatgggaacccacttttaaaagtgtcagatatgagactagacactcactactgtaaaattgttgcctaaaaggtatccttgcagatgcatgcacacatggggtaaatgatgaaaaccatcccaatagccctggaggggaacatccagggacttacattttacaaaatggttattatgtgtactgtggtttacattaaagtacaggagctaaatgtcactcattctcaccttggtgactaacacactgagtttagcgagattaaatgactcgctatatgagagtatatatttggtgctggctgagtcccagtagcggggcacaaagcttggtcttcttctgttatgctagaggctctgagtgcataccaggttataaaggagcacgtatctcccccagtgccaccttacagtagtctcaggtttgcacacttgaccacagtccatggacagagacttggaactgtctgtccactgtttttctcagcacactgacttgaggtagacaatcagcatcttgattaaataggatttgcaatcagaagtttctgaataaggaagaatttgataaattctaatgaggtcataatgtaagcaaaagaaaaatcaaaaggtgtaagaataaggaaaacaacaaaacaccatcaagacgggatgccaaagcatcaagtgagggaagttgggaaatgccatgaaaattccaaagccttgactgtaacatgaaaattccaaagcctcaccagagccttgactgtaacatgaaaagagcagatgaggaagcaatggtggcatgatggctgtgattaattaggtctaccacagggacatgtgtcattagcatctgtaccactcagcaagggaagcatccctcataacttcaacattggcaacattctaagttccattatgtctctggaagccaatgccctcacagtatgatgatgtcctgtacttttctaaggataaacaaattagtaatgactgctatttggtgaatgccttcctaggcatgcacagaaactgtcttcatattatatcccatgtactcccagttattagtaatgtttccatatttttaagtgaagatattaaagataattaaacaatgtggttcaagtcacacacttaatagacgacaaagcaagggttttagcctaggactatcttgtttgatatccagacctaacttgtgaagcctttggcaatcagtacttctacacaaggatgctatccattgtatttgtaattaactgtcttgtccaggcttctttttagaaatggtatcaattaaaggtggctgcagcttcttcttgtactcaacagacagacctgttgaacactgagggctgcattccttaaaggtgctatatcctaactggaattaaattattattatatgaagctggaggtatgactcagtgtttaagagtacttactgctcttctagggggactgggttcaatttccagcacccatagtcggcaactcagagtgcactctacaattccagctccatgatctctcatcctctctctggcctttgctggtgctgatacatgtaggctcatgaaagagaacctataactgccactttactaaaccagcataattcctaattacattttaaatatttatcattatgcccataggtaagtatagatctcattcctcatcaaacaaatgtctatttgatacagacagagaccattatagaaaactacaaccaatcaaaattcaaagaataaatgactgtgtagtgcttatctgtgattgatacatctacagtacagctcctaccctgaaggctcagggattgtagtgaaagaggctggcagaaagattgtgagatccagaggaacaggaaggtttttgtgagatagtgtctcttggaaatgtcagagatgctacatcatgaagtctcaacaagaatactgcctaaataagacctgaacaatgacaacaccaataggcatgctgtttcagaagggggaaatctcatatgccttaaccctagacaaaggactgcaaaatgcaaagagtaggagaaacagttttccccaagaagagcctctcaataccaagtggtcagctctgaaatcgtgtgtgtgtgtgtgtgtgtgtgtgtgtgtgtgtgtgtgtgtgtgtgtgtgtacttaaaaagaggcaaagactgtggggaaggggaaggttatgtgggaaggattggaggaaagagaaggggataacaataattatcatattttaatttcaaaattaaaattatcaagatactgttatgtttttatttatatcaaattagttcctctatttttgtgtacatttgtgttatgaaatttccagtgtgagtttattaagacatcaacaatgtgttaaacatgtaagtgttccttttaaaagcatataaacatatgtatttgtgtttcagcatatctcataattatgccactcttcttgaagcatacctggcttgacccctgtgtgtgctctgggatcatttccaagtagcagaaattctcgttttgtgagatgagtagatgtcactgggatggatgggagtgatgacatgggttattgattcctgagagtatctgaggtgatttgctctaaaccatgaattatgttccagtcttccattttaatattttaatcataactctttagtcctaaggaggtataacttgctctaaaattccacaaccttaattttctagaatgcccttgaacacagcagtcatacacaacagtatttcctctgttaggaagtggaacaactaaaacacttgtgaattggctaagggaatgaaatcaaagtttccagaaatcagcttcatataattagtaaatctcactactacaaccagtgccagcagccctgaaatcaagtccaggagtcagcgaactgtggctcacaggccaaatgtcccaccacctgtttttgtatgttgtggaagccaaggatgctatttatattttaaatggttgtaagaatatagggtaagaagagtaccgtctgaaaaagtatgtgaagctcaagtttgatgtccttaaagaaaggttttcctggagcactgccatacacacttgtttttacatcatcccttggctacatccaggcctcaccagaagaactttggtgagtgaatgagtggtctgtgaactctatgatgcttattctgtgatgtattataaagaagtctacatgctgatcagatgcatgacccttagttcttcaaaggtggcaggtcgcagaaaggtgcctacacctgacaggcggtgttctcttcaaatctggagggtgggtcagattctcaggaaggcatgtcagatatacatgcatctgagtaccacacagtcacttaggagtagataacacagcaagaatgcaaaagaaggaggcaataatcttagagctggtagagatattagagaggatgagatgcttgaggcaaaactggtttacatctcatgaggtgtaacacaataataattctacaaaagaaatatacaagttaggaatcacctttctggttcatcactgtgcagcatagaagtgattttttttttttttttaggaagcagtaatctgagtgttgcatatcttttgaataataaagttgtaagaatcttgagaccgcacacacacacacacacacacacacacacacacacacacacacacacacacacacaatctttacaaaggagaaaatgatgtagttgtgtcttaaggtatacatatttgtcttgagagggctgtgaaagatgatgtcagagtggccagttagctgcattctttggaatcccacagaatgatctcagcaacatctatttcttcagtggttttcagtagtgacataaatctcgatgaattcatttcatatgaatatggctgccctaccctctttcttctatgctgctcttcattttatatcagtatcacatctcctgaagcagtaatcaaaataaacccttctgaagaaaggataaatgatggccagcgaagccagtcaggttgctttccacgcacatggcctccctgtgacataggttttggctctcaacttgatgggggcttggaaacactgaggaaacacacccctagatgtgtctacaagggtgtttccagacaggactgatcaaggcatggacgactagccctcacagtggataccttcgaaaggtagatggaggtgtgaggaaaaggtattatgtacctgcttcccttccttcttcctgagcagtgtgcctatcaaggctgcttctctcagcatcagagtgggcctactgaggcatccggcttcatagactgagctagttctctatccctctagcatgcaaatggccattgttggtctgactgattcccctgtataagccaccctaataaattacctttaataatatgtatgtatctcattggttctattacccccaaagaactctgctaaatacattcccttagcaggtgatcagtctttctttccatttactctgggaccatgggcctaacagtccagaggagtattagattatactgaagtctatttttttttacaaataactaaaaagagaggcaaagttggactaccaaacatatctgtgcatgaacagagaaggtgttagaaagtcctgggttcaggtgcttggtatcaagtgaaattgcaacaatcagtgtattactcttcttcaccacaccccaagcctgtttcacatgtagatgctgtgatctttgctgccctttcatcagacatttcactggtctgtttccccgtgaatggctcttttagactcggtcttatcattaccagcaaaaaagcattaagcaataattatatgcactatgtaatagtcactataaaagatcagaaaaaaaaggaatatgctgccctcattgtgacaaatgtgtgatcttgtcagaaatcagaataaccaacagaaaaattccactggggaaacagttaagtaatcctcatacttttctctagtaatttcatctgttaagtatatttaaaggctcatgctatattctatgaagcttctgggtctcccggagaagcctgaagctctgtatacctctgtaaagggtccagaaaacaaacaacagggcatgaaataaacagaaccagatacttgtgttctggactagggaatgtggatcacttccagccttggttaagaaaatgccccacatgatcttccacccatttcctgggattctgaaggtctctgagtggtggaagactcacattggcaagagcctggatcactgagcttgatgcatgaaagtaaatttgttccagtagaaaaatctagatcagagctggtatttgtgacacaaatctttactctactaagccaatgagactgaaatgatcaagacaagacatcctggaaagacgagatatgctgatcctgaaacatcactcatgaattctggacctaacaggaaagttcagaactctcccaggctcgtttctttgcaacttatgatggctaacatcaggattggttttaatttgactgaaatatacacaacacactgattttcctataaatcctagatatcagagatagctgaagtcacctgagtttgtggcttggaccaaagaagagtttgctatttgacattaaccgtgactattcttcagttacattcttataaacaactaaaggcaactctcatggtggagtaggattgggagtgtctttattttctcactcacacaaagaaatctcaatgaatacaaatttttacaaatactaacaggcctgatacacagccattcttgaataaccaatactcagttttctaaacttcccccttgcttgctttttctggagagccacgaatgctgacaattggaatgggctggtttataaatgagagaacatggggaccctgagatctagagaggttagatcacttggaataggtccatcacaatcatctggagccacctcggggaacacatgcactacagtgctttgttttatctgactttcgcctttccctccccttctttcatttcttttgtattcttgattcttggcatcagtatccatttgtaagcttttagtatacaaaaaaaaaaaaaaagaaaagaaaagcctaataagaaaggaaaccaagatcaagtaagatgcagccatcaccagcccttctaacagatgatgtttgcagttcaggatcgttaactgtacataggaatcgaggtgttttcctaaataagtcataccgaatgtgcaagtctgtggctgtttaatttatcatgagatgatattgctgggcacacctgtgtgagtacatacttctggatatggctgtgcataaacgcagctagctggatcccggggtatgtagacctggctgtagtccaaaaaggaattttccattgatcttccagtttaattatatctggggtgatgtctgctaccttgtgaatcatcatgtggactcgttaggcacctgttctctctccacttgcaaggaaaatgtttcaattagaattaaaaaaaagattaaagatctttcctcttcatttcttactctgggtaactgggagaaaattgacatgaatatgtagctaggcaggtggagaacaggtcaaatcacagatctgaacttattatctccattccatttctccctagcatgctctcacctttcaatcccccccaacacacacacacacacacacacacacacacacacacacacacacacacacacacacacacacacaagcattcattatatggttgccatttattcatacatttataattttgttttttcaaattaaggctctgtgaatcatcatgcatcaagttgctgttattcttttcatcctgaaaagcttgatgcaatggtttacatgtggccgaagacacaactgctgatgaacaatttcttggaagataaagacagaggcaaacccgaaggcatgagtgtgccaggctctgcattaggcagtttcaaatagcccagcttctcctcacaccatttcaggcaagagaggtgttattaatttcacatctttgctggaaaataactgaggccaagaactattcacacttggcttggtgtagttcccaagtttacctcatacaccctaagctgaagcattgatcaagccatggctctgaagatctgtggctttttatgatgtaccaaactaacacaggcagtaaacaaatgctaccaggaggacaggaaggagctgaaggcttaaaaaatgctttcccaattgcacttgtaaaaagactttccagtgtcacacccatgtaagtcttcagttcggaaagagagtagaacacaccagcggcagaattgcttgggttgaattgcccgagggcccatgcaggatcaatgggcacacaccaaccccagatgtaagcaatgaaggctgttttatctacctatgtggtgtcatggttgtcttgtatgcagtaaatgagtacagatgttgaaaaaacagaaagaaacaaacgatttcccatgccacattatctattaagacagagaaagctgggaaacagacaaaaagccacagacatttcactgcctacaagaaaatgattagtctataccacttccaaataacaggaactaatgacaaagattcaaatcatagcagtataggtctggaagagcaatgggcaattattgtatctcatagacaagggacacaactgtgatggacatggcttaaagacacatctgtggcacatttatagctccattcctggttcccaggctttagaaaaacctagaaaaggctagtgttcagaccatagatgtcaagtagagaaagacaaagtctgttgtttaggctgagctatggaccgagtgaggccaatggaattcgtttctcatttagtcttaaggtgtctctattgagaaggaccataagctaagatagccactttctagacaggcctgacacaaacagaagtctgagagtctatgtgtcaggtgagacaaaacaaagaggaaaaattaaaataaggctgaagaaatcaatttctaatgtgtcccagagaagttcagggtgctgaatggaaacctacaaagtccagaagtggaggagaggtagggccttgcctttatgaaagctcatggcattatctcctaggtattccctcggtgactatagggcatcaggtttaaagagaatactatgattctagtgttgaccattaggttttattataggctgttgctttggggtgtgttgtgtttggggtcaataaatgaagtaaaagagggccatactgcagtatttttgaaaaagttttaattgaaccaaggttaaggatctgattggatttcaaataactcgtgtcagtgtcagaaactttattaaaataaaagtaacccacagctctgctttctgtagtattctcagtgctgcggtgggccagccacccaccgtgtctgggaggtgatggcgtgacacatcatactgtgcactgtcactgccagtgtttcccccgtcagagcagcagacttgctatttgtgtcattcttttcttcagatgactgtccctacacttcagtcactatgagctctccatcccagaagcaacaaatttccagacacatgtgtccattgagtaggaggtgtttctgctcacttgtctctgtgccaccttgctagtggctttatcctagcatcaagtctccatgtcagttaccccaatgggtctaaagagtgcccatgtgaagaaatgagcttcctacccactcattgctggcacatgccctattccttcactaaattctgggagctaagcttgggaagggatatcaattagacagcctgtccattctaatctccagctcttcccatcctgttggccctctgatgccattcattgtgaagtgtaccacaaacttagcaaccaatttggaaggttgatggaagagacactacacatcttcttgaagataaaaaggtacagagtaattatagtgctatgaaaattggaaaatataaaacaaaacccagaatggagaaagtgtgtatttgctaatgggtacaaatgtctagtcctaagtatctcccatttctttgcccaaaagaaatggttttattctttttcctatctgtactcaggaactatgatattgatattttcattgtgttttaagtgggacacacatcctcttattttgacaggaaaatgtcattttcaaaggaaaccttgtaaatgaagttttcctgtcccgaccacccagtcacaaatagcctactcagaagctaaatatgaataataaatgctcagtcaatagctcaggtttgttactagctaacttttacattgaaattaacccatatctattaatatacatattgctacatggcttgtggctttatctgtactctagcacaggtggctttacctgtactcttgcctcctgggtggttggctggagttccctgactctgccctccttcttcccataattctcagtttggcttttctgcctaacttcctttccagctaccagcctgtcatatttttatcaaccaatgagagcaatatatattcatagtgtagaaaaggattgttccacagcaaaacactttgtattctccttttaatctcatctgagaatctatctgctcatatgttgacaggcatgtgtggtgttttttttttttaaatgaattgggttgataaaagacaggccatcaacatctagaacaacatgacacagagctcttgtcaccaaaggctctctgtcaccctcactgacaccaccactctgtgtctcaagtgtgacttgctgccatgaaaacaggtctactagcctctaaacagcctatggaactgtattctaggacacagctgtatagacaaggggtcacatgacgtgtctgtccactgcttttcatcttggctcaaaggtcaccttttcaaggaggcttttggtgaccataccacactatctaaaattgtgtttcgcggggtctgcccattctggataccttctagtctgtcatgcttacttctacttttaccagaattagttgtctttcctttgttcattttctatatgctatggaatctgagttacactgcggggtgggagggggaatctatcagtttgttcactataatgtgtctagaacttttaaaagaacttggtatatagctgaacaaacaacccttgtggtatgattgtgcatcctttggacatatgcccaagagtggtattgctaggtcttgaggtacattgaggtaccttcccaattttctgagaaactgccataatgatttccaaagtgaacatttgctcaacgatgttcatagcagccttatttgtaatagccagaacctggaaacaacatagatgcccttcaaccgaataatgaataaagaaagtatggtacatttacacaatggaatacttactactcagtggaaataacaaaaaaaaatgacatcttgaaatttgcaggcaaatggatggaactaggaaaaaaatggtgccaagtgaggtaacccagacccagaaaggcaaacatggtatttactcactcataagtggatattagactagttgtaaagcaaaggataaccaggctacaatccacaacctcagagaagctaggtaaaaagaagaaccctaagagggacacacatggcaggcctcaggaaggagaaataattaagatctcctgtgtaaactgggaggggagatagaagggagggatggaggatgggaacatgagggatcaagaaggctgagttgggggcaggaactgagggggagagcaatgaagagatattttgatagagggagccactatggggttagggagaaacctagtactagagaaattcccaggaatccacaaggattagtggagagggtacctgaaagacccttcccctctaataggattagtgactatcctaattgtcatcatagaacctacatccagtacctgatggaaacagatgcaatgtcccacagccaaatactgggctgagctcctggagtttagttgaagagagggaggagggatcatatgaacaaggggggttaagatcacgatggggaaacccacagagacagctgacccgagctagtgggaactcactggactatgggctgacacatagagaacctacataggacagaaataggccctctgaatgtgggtgacagttatgtggcttgattttggggggttggaccctggcaatggcaccaggacctatcctgggtacatgaactggactttcagagcccattctctaaggtgggataccttgctcagtcttgatacatgagggaggggcttggtcctgcctcaacttggtatgccagacttttgactccccaaggaaggccttaccccctctgaggagtgggtgaggatgggggaacttaggggagaagagaagatgaatgatggggaactggggttggtatataaaatgaaaaaattttaaatgaagtatctggtatagagtaagcattcaacaaacatgttcttatgaatgagtgaatgaatgagtgaatgaatgagtgaatgaatgaatgaatgaatgaaacattctttatggctgctgtttctctgagtcactaattgtcagtccagtgtctgtgtggttgtttggtttatccattctgtctcaaatcttgatcacccccatccttactattgcctccacagaactgtcttagtattgcttccacagaactgtctctgaagcatgcacttcattacattatttccaaatccaaaacctcttagcctactgtagcccccacctgtaggatctacaccaaattattttctacagtataaaagactcggtgggagtctggggggggcattcaagccggagccaccagctcaacctgggtttgaatcagcaacagtcgaaacaaagccaagcaagggcatggaattctaactctgacccacagtggaactccagtcaaggccctatcccatgccatgtggctgtggtggacagaaagcagccaaatgtaacaaccaggagcctacccagcaccataggcactataatgacctccttgtgatgaggaagcatggcccagccctgtgtcaaggcaaccaaagtgagacaaagcaacccacatgcaggcctgggtctgcccaccccaggctctgaagagaaaacacaggcccaccaggtaccttacagcaccagtgagaagaaggccactattagagtgagcagaagtactgcattgtgtcttatggggtgttggaggggggagagagagacagagacagagggagacagaaagagaaagacagagacagagagtggttcaggtcctatggacagaggcaaatctgaagagacaagaaaagaagcaagcagacttagagggtgagggagaggatcccttgaccaaaggcaacagggaagtaagccctgcactctgtctgggcagcacagcagagttgaccctgttgatgagagcacaggtgagccaactctgaggacctgagttctagatcataggagacctagttctaccccttatctgctacatagcaatttcggctggggagagatgcctttccctcctgggctcatcaaagcctggggcaggtgggagagctggccttgtggtcataagggtgctccccacctgctctccctgtattcagggagagcaagccctgcaccttccctgagcagcacaatggagccaaccctgttggtgggggcgtgggtgagccagccccaaaatagtgaacaaggaagagctgtctccattactcatcagttatgagacggtgtgggcaggggagggttgtcctctccccaccctgcacatcaatgcctggagcaggtgggagagctggcctgtgatcataagagcaggagggctgtccctaacccccaacagctgcaacattcaggagagcagacactgcacctcaacagggcagcacaatagagccaacactgtctaccccgaaactgtgaccacaagagcaatccctgttacccatctgtcttgtggcaacagggtaggggggaattgcccccgcacctgcccattaacccatgaggcaggtgggaaaaatggctctgtggtcatatgagtgagagagcaatccctgacttctatcagccacaacactcaggagaacatgccctgaacttctcttcagggcagcataatagagccaacatggttagagcagatgtaggtgagccagctatgaaattgtgcccatgggagaactgtccccattttccatctggtagaccaaccctatagctgcctaggccctcacccgggtttatgacttggcctactccaacatccatcccatctacagtctgctggagcacgtgaagggaccttatctacagagccaaaaacagaccacaacataggacgacagaaggatgtccaggaagaattctagtgagggtgatggggaatatccttctgtgtatgtttatcttattgttgaataaagcactgtttggccaatgaggcagcaagttaggtgggactaggagtcgaggaggattctgggaaatgtagcaaagaagtcttgagatccaggcaggaagtaacatagcaggcagactccatatataaacaagggcaagaaggaagttgtccctttcgctcttcctcctgctctctgttctgacctgccatgtgatccagggatgaggatgccagtggaaggtgtcctacataagataagtcttataaaatatatagacttatgacaattaagactgagctagcagatgagaaatcctagtcattggccaagcagcgttgtacctaatataagtctctatgtgttacttgtggggaccttaccacagcagctggtggaactctggtgccctggcagaaagcgcccacatggcagcaggactctggcagcttggcggaaaaatttattgttatagtaggggtccatcaatgaacatgtagtgaagaccagaagcctagaacccaacctataactctttgcaatgaacacttgcaagtagagatgcatggaaaagggggtatatgctgtaacttgttggatcacactgcagcttccatgatgagatttttaattccttcctttttttacttttctcattttattttcttcatttttttctcttaagttttgttttattgggaggcgttcagaggtgtagggcagatgcaaagggatggggaatgaatgggatcaagatacatgatgtgaaaaacacatagaataaataaataaaacatgaaaacagactgtgtttgggtattgctggcctctcctattctatctagaatactccccctctgtctgcctagtaagtaccctctccttctctaacaccttccaaatatactaaccactatattctaccttcgtctaaggtgattcacaatatctcaccctactctctccttaacccagagaaactctcagcattgcttcttattttaaaagccattggtgaagccttggtaactagtttggtttctttccttaatagccttccgcatgccatggactgggcagagacgaggaaaaagcggtaagcaagtggtagatatgtcagggctgtggctctgagttggggagttcttcatacctaagatgccaaagaaagggcacagtagacaagatagtgataggaagggaatgtggaggaagatgaagcgaagcagaaaaggggctccagtgatggtttaaataatgtacgtggtcaatcctaaacaggaatgggagccatcaaaagattttaagacaagccccctgcctgagttgcatactaaatgcaccattctgggcacattctcatcgatggttggaagggataaccagagagaacaaagatatttgggacccaagctacaaatgactgacagagatggagtcggctgtggatctgactgtgcagattgaaggtgaagttgagggattaggtagatattattcagtcactcactgggcacgccctgagagactcagtcatctataatgaaagccactgtctatttccctgcagcctatcactaacagtgtggtctatggacaagtatcacttctcctgactcattagaaatggggtcacttactgagaatctgcatctagacaaattcttcagaggacccctgggaacattcaaatttgaaaagcagagtcccagtagactcagtctcctactatcacactaggaaagttggtaaatgaatatatatatatatatatatatatatatatatatatatatgtgtgtgtgtgtgtgtgtgtgtgtgtggtgtgtgtgtgtgtgtgtgtgtgtgtgtatgactatgttttcataggtacgtatacacgtagcacaagctcattttaagactcatacaaatggactaatagggaaaactacagattcctaaattcccagttgaagatagttgaaaaatagtaatttttcctgttttgtagaagggctgcccacaagatctacaggagaaatacttgttacactttccagacaatcatcactgggtaagacagaaggaacaagaataatacattgaagtttgtcataagtgcataggagtggtacctaaattcatctgctgacctgtgacctcatgaatgtcctcagttaaccaatacaggaagttgaccaatccatcaacacagtgcaactgcactcttcgattcttcttatagctctccaggaaggactgcttaggagaagccaagataagagagaaacgcagtggccacgtgttggttttgaatagcagcacagtctgttgactgaccttttctgccctttaatttgcttgaaaatgagttagcaatcaggttaattgaatgctatctgggaggggtgtgtgtgtgtgtgtgtgtgtgtgtgtgtgtgtgtgtgtgtgtgtgtgtgtgtgtgcttgtgtgtttgtgtgcttgtatgtgtggtgtatttcagaggctcacacttcaggagctcctgtgttctgggttgctgttgaaaatataccccccactggtttctgggtcctctggccaccctggaactctgcccatctaacttgctgagatatgtctgtcattttttgactgggtgtgattctatcagcccagtgacttgtcaggtccccaagaaattaaaaaaggaaaagtccagatggtgacatttgtggtgaaaaagaaaagtgtctttttcagtcaagctgccttccaattatttaaatttatacagattttatttatttatttgccattttctcttctaaaaggagaaagttctgggcctgcaaacaggttgcctgcagccctggatcactggtacagggatgctcatggctgggacgtgatttatagcaaagctgaagaaaggcaccgagtctctcaggaagcaaaccctgggctctggggatgactgtatactagtgtcctctcatgtagtagtacttctcatctctccttcagaagatttaatgcttttaattctacaaaagccagtgatattctttgaggggtgtgtgtatatttcctccctctctgttgagcctgctgcatgcaaggccctataaatgctgtgactaatgggagctatcagtgaaagtgtgtgagtttcaagcactattttaaatgctctatatgcattgcttcatttaatgcccataaaaactaggtgacacatgtgtacattattattttcatttgtttcaggtaataaaatgagaaaatgggtttcaggaggttatgtacatagctcaaggtcacaggtgagtaggtggcaggtccatagtgggagtcaggtcattgaaatcaccaaaattcacacactagcaaaccccacagcatactctcaagaactgatgaagaaagcctggggttctcagtggaggaagaaagatatgatggtccgtcagggagggtgacaagaaagactagcctaaagggagtgtggacactaactgaattaagaggggcagcaaaggcagctgagctgacggtaaattaacttacgaggagtgattacagcagtgttcgggaagctcttatgctttgagtacaggacacatgtaaaactcaagtatagaggggccaagaagccatgactatagtgaaaggcatctgtcttctgagctttggcatttatgcttgtcttagacttggggacattttaaagcaggaagatgatgtaattgcgtacacattttattaaaatccctctttatctgagtaggaaataaactttatacttgtgtttatatcctcttgtcttcctgcttgcagctgcctgctcctcctttgtggcagcagactgacaggagctggatctttgcatataactgattgccagcactctaccctgtgcagtcagtcttagattttagctttggccccagaaattctgactaagaactgtgctctgggaaaagtaaacagctttggtaagcacagggaaattacagacattctgtgagagctaataaggacgtaggtaaggaaacccatccctttcttcctcaggacaatgtccatctccagccagctcagcctagttcctatactaattctaacttctttgaactcaggatatttgccctaatccaaaatttcaaattcaaattttgatatattattctttccttctaaactactctttttcatattcaattttttgtaattgttttaaatgaacaattattcattttgtgtatatatgtgtgttcgtacacacacatgagtgcagtgcccaaggaggccagaagaggacatcacatattccaaatctggagttacagttggttgtaagccacccaatgtgggtcctaggaacccaaatcaggtcctctggatgagcagtacatgctcttaaccaataagccatctttctagtcaaccccccttaaaaaatcattgtgtaaccctctgccctcctaattcagcccagattcaaagccattctaaaagttctatctttccatacctcccagtggagcaaactcctatgcattgctagggaaaacacagcaggcagctttgagggaaaccttttcattaacccatctgtgagtctgatgttgacaataaagacttttcagattgagtatgcgacagatgtgtttatcttactttagtgatggggatttagcactgtggttaatggaaatgtcttcccatagctttcccaacaaccctaccaccaccaacaccccaccacctctactaccaccactaaccaccataaccatcaccaccaccatcaccaccaccaccaccaacaacaacaacaataactaccaaagtacattattcttgattgctagtcaatgaaatactgggcaggagaaagccagattcttgtatatgttaaaatgacaatccactcccctgacaaaatgtgagatgttctgccctgaagcagttacggcctcagttttgaatattatccttattcctacttattttcctcagtctctaaatcataaaaaaatccttgaactttttttttttttagtcaaatgaagccttctgataggacatgatccaaatgtgctcattttaagtaagagagggaaccaaatgtagttaagattattctatctggggatcactaaagcaaatcagctcccaagtggataaagtagtaggaagacatggatatattttagccttcattcttctctgagcatatctccaggtcaatgattgctctaacaagcaaggctactaaggtcaacttatgtccttctgtcttaattctgtttccaaatactcatatctttagaactatgatataaacaggatattaaagtgaaaaaaaatctaagatgacagataccttgactgtcccactaaaattttgaagtaggtgtaaatcatgctttaagatccctatcattaaagacatgaaagaagcattatgctaatgatgagggccttcccatgtcatgttacaccaacaacttgatatgtaccctgtgagaccatgaccttgtatctggtgtccatttgaataatgcaaagggcaacagagggagaagctctgtacctctttggcaatagaaaattgctactgcttccagcttaaactgtgtaccaaatactgcacccaaaagtatggagagaggatttcccattcccctggagtacacaggagtcgttggaagaaacaaaagtaacccacaaaaatgagtcatctgaaaagatcatgggagccccaagagagatggtctatctgcaatggagcctacaacaacaatgtgggggaaagacctagtggagccaggatgtacaaattgtgttctgatcaaggtctgataatctatcaaaagaacaacttgtaacctcttcttaggacaaagaacataatgaatcttagctgatgactaggcatattctgctctcattgccttcttctcccctgtggctttaatatggtatttagaatcatcacataggacaggaccaaagtggtatcaatatccagggggagaaagggtgagaggaaattccatgccatcttctgtgttttgacttcccaaaaccccagcacaggaagagaaaataattagactttgcatgaaattttcaatgtttcaatgggcatacagaatcagacacttctgtgagcttgaacctcctggttttagtattattgactgaggatacattaagcaggaagagctatgagacaactaaatgtgaaccattgactatatataaatgaaagccaaaattacttagcttttattgtcagcacatggaaaataataaataaacaaataaatataaataaacaaatgtgaaattgtcattaggaaaaggcctatgggtttcagggagatctttttagatgcaaacaatgtggttagtttctatgtttactacaaacagaatgagacttcaggcttgagaggaacaaattgatgaagtggattttaagaggttcaaagtaaggagatttttttttaagggaagaaattactttcggaaatgggacatgacattgtcctctgagattggaactaaatagctgaggatagatgataatgtaaatttggaatttgatgaaaaaatggagggagttgtaagaaaacattctcatctagtcatattgaaagatgctcagtgctagcaattaagtactgggtctgacactgtggtgcctatgaaagcagagttcttagaagctttatcagatgcctccaagataagcactcctggcttatctttctgacaccatatgttccaatctatcaaggcccatcttttcccttcttcttccttttaccacagcttttggatatcactaattaggatccaagaacatatattaatcaaacaatgtccaaagaaacacatcatgaaaaattgagatgcgtagtagggtgctttgacatagaccaacatagttgagaagaatgggtaccatggaacagagctaagggtacttaaacctgttaatagaaaatggtctttacatataccaaggtcaagaaatcgtcctgagtttcattaagacagtgtgattattaacttgatagtatgtagagttatctggaaacagggcactgagcatgcctgtgagggattttctagattaagctaactgaagtgcaaagactcacattccactagttggggtagtggactgaataaaacagggaaattgggctgagtgccagcaactgttgctctctgcttcttgagaacagatgaaacaaggctagctgccttaagctcaatgaccttcccatcaagatggactataccctcaaaactgtgggccaaaaataaattccttctttcctaaagttgcttatgtcaagaattttgtcacagcaacaagataagtaactaatacatgtagatgaaatactgcattttctacataattatagtttctcaagagacatacttgtaggtggaagccagaagaaggagactagctaactaaatcaaacaaaataactactgagtttattgtcatgtatgtggtcactgaatctaaatcaaccattttgctaagtagcatggcttttcagtctcaactaactaatatatgtcaatctatgactttatggttgtttctaacatacatgggactaaattggtcaacattgttagaagcaggccagtcattatttgtactccccccttcctccctccatgtttggtatctattcttttgaactaattagcaggctcattcaggttagcccaagtttggtgttttagaaacaagacccaaagttggttaatctatgaaaaacagaaatttacttcttatagcttcagacgcaagaagtccaagaacaaggccctagcagtttttactgtcttagcaagaaactgctttctgtttctatgatgatgtctctagtgactcatcttcccaagagaaaggtctctgtcctcacaagactgtagggggaatggcagttgagctgaccactgtatgaacattcatttttaagggttttaatcttattcacaagggaaggaagttttgtgaccagggtgtcactgggattttagtctggactccccaaggttccctggtccttgtggtccctgtcaaatgaacaatagaggggagtgttgaagataggcagtgtttattatagggcagagtcaaccactgtcctaactgatggtatgggtgggctttttatgattttctatgactattaacttgataagatttagaattaactgagatgaatcttggccatgtctgtgaagaattatcctcattaggttagttaaaatgggaagactcacccaaagttttaggcagcaccattctataggcccagatcctggactgaatgaaaagggaaagtaagatgaatagtagcacccgtaactatctgcttacttacagcagacgccatgtgaccagcagccttgtgttcctgatgtctatgatgtcatgtcctccctaccacagtggatggcccccagatggtgagcccaaataaacccttccttcctgaagttgctctggttaggtgttttgttgcagtgatgagaaaagtttcactgcactctggaacaagtatattttcctgagagccttgtggtggactgattgatgcttctgtttggattgatgcttacaagaaggggcaatgggatgcctttgttctttatctgaaagcctcctgctggatagtattcttacaaggctttgagtccctgtcaccagctctactacttatcctttaatgatctcttaggcagctcaggatgtcatgttcagggtcacagatgtgactctgattctactttgctcagtagtaattgaagttccactgtcccagccttttatttttagtctgttgactatgaaagaggagtctagtttcatggtcctccaagcatgttaatatatatctatctacccaacataattaccttttcaagggactacttattaatatctccttagtagttttaagaattttttattttacttactatttaggtttggcaggatagggacactctgtcactaagctgtctggttggtcttggctttaggttttacaatttatattttagaggtgacacctaaaaccctcacattcttcctgtactcttgaagggctctacagggtattatagcttacatgttaagtttgaagctcatttataccacttcaacctttttggaattcttgctatatgaaaacaccctactagttactggggaacagatgatcaaatggacatcatgtctcttcctaatgagcccatgaggtctttgaaaagaaagacataaatccgacatgcacaaggcagacagtataggctatattgggccagcggtcccttcttgagttttcatgtacctcctttaaattaatttctcagatatgttttccttaaggcagagactatgtttgtatttttagaaatcctcttttaaaaatgtatgttaaaatgttagcagtctctctgtactaacaatatactttttaaagtaatttatctttcagatcaattttaggttccagaccaattccaggtagggatttgctacctggaatggtatgtacatcattgcacacatgcacagctcccctcctatcagaattgcccaatgaactgaccaatttgttacaactataaatctaagagagtataccataatcacctaaaagccatgcccccctcattactttttatataccttctaagacctgaaattttgagaaagagagaagtcgcttagattttttttttttttcaatttggatagatgaaagtgactacttagtagatttctgggcattggacagaccatgatttctcagatactttactatgcctggtttaaaaatctgcttcatgctcagccaggtgtcccctgctagacaagtctctgaaatgtagaccctcaatgcaaattgcatttctttgcgctcccaggaaaaaaaatcattctaatttttggactgttgtcgtgctactccacattcagtgaactgtggcaagcccaggcatgttgatttaaatggattctgttgaaatgtaacactagctctccaacacctgtttgcatttccatactgactcaatagaaaggaagtgacattttcatgcagaacgtgctcaataaggtcccacttttaggcttctgattgaggagggagaggcagattctctttaacttctttgtaatttgttcattcaggtaatctttcactcatccatcaggctgggagcacctgctcagtaccaggtcctgtgggtagtcactggtatgcaaactgactactcctgcagtagtaggggaaaaacacacacacacacacacacattaacaaaggatttgcttctcctgaaattgatgctgataatgtccaggacagaaggccaggtgtgcttttgccaagtgacttactttgttctggtcatgtaacaaatgtcactgttaaggatgtggattctggagcaatgctacctgtattcaaaggacagatctgtcaattactaactatgtcaccctggtaaagtgattgcatttcttatctgtaagatggggacaatgatggtatctagtcagagtattttagagaaaactaacacctggcagataacaagtattcgacacgcatgacacatgtgttggcttttattctggtatttctgcattaacacagattatttgggtatctgacacaaagccctctctctcccctcccccgtgtgtgtgtgtgtgtgtgtgtgtgtgtgtgtgtgtgtgtgtgtgtgtgtgtgtagatgtgttgtatatctttgtacaggtgtattttgcttactcattgaagcagataagaatgaaggattttatgtactcccctactccccttgtcatttgcacccacgtctagtatttctaaataaattctaagaagattcttgcttgaagttggagagaggactgaagagagacaaaggaaattccagaaaggctcaggacagccaggacagaatcacaacaaaccatacaatagtattccaggcagtctgaaaatcctactggaagggtggatctgcgacctccagctcattctgtcaataaatgagttaacttcctctaatgggtaaaagtctattatgctttgtttctctgtgtcccacttcctgtgacagttaatcctcatggtcattttgactagatttagaatcccttgaatattagtgacacacacctctgggtgtttctgtctatgaaggtgcttctagaattggggaagactcaccttgaatgtttggcttctttgaaatcagtccatagcctacccgaagttattccgtgttgtgtaaattcatactgctctcagagactccattttaccagcagctttggacaccatcttgaggtgaagtgaccagatcctcacccagccccctgttttggcagccatgacaggctgcagaaaagaccccacaagatgtaagcctctgactcagcaacacttgctgagctcctgacattccctaattactgggaataaactactagatatcctccatgtggcaaggaaccaatcagaagttagctggaggactctggaatacagagcatagcaatagctctggggagggcctataggccatagcaaccttgttgcagttgcagctgcagctggccgatcaactcaggacaggttgcccaagcccagaagtgcaccaatcttgagactgttgtggaccccagacactccccttgctctaccccaatatattccctgcccactgcttcttgaggtcccccacctggtccctgcctgctttaaccaatgtgttggatggatggggaacagagttaacttgtaaaattgaagactctttgcttttgcattagattgggtttcttggtgatttgggtattcagagtttgggcacaacagagggtggaggactgactctgcacctgagtggatgtacgaatggcatcatctgcttggcactatccacacagcacagactgataaatgctatattcttgggagtagacaaggtgaagccctatgatttaacagagtaaactgtgagtgtaggagcatatggacatagtaaaatcgtatcaggaaaaccaggctcaggaactcattgagcacaccagagtgaaaagagaggcttcaactctcttgtctagacttcacaggcagtgctatgacggtgatggcctcactgccctgacatttgtccactgatagagaactctaccctgtctagatccatgctactgataagattggttcattatcacaattccacagactcctctacatttccatcagtacccaagttctggtctcttagtctgccttgaaaaattcttcaacagtttttagtcactctgtagtctacaacaaaatattcatccatgtttctgacatagtagcctcaaacaatcactctatgagctggaggcctacagagactgaaatcagcaaaagaaaaatgtagccaagtgctggcattccccatctcagctagatgcctaccaagaagcacagactagcctctgccacatgttcccattgtcatgaccaatcaaaacagcccctcgtcttcagttgtttatgacaagtatttggtcagagctatgtaaaatgttgactaatgctgttatactggcatcggagacccatggagagaaagttatttccttttggtcaaaataatggaacctatctgttggggagacataccattatgtcttttttttttctctcatttttttaaaatttaaattagaaacaagattgttttacatgtcaatcccaattctctccccctcccctcctctacctatccaataccatttctgctccccagggagggtgaagccttccatggagggatgtcttcagagtctatcatatcctttgggatagggcctaggccctcccttgagtgtctaggatgaggaagtatccctccatgtggaatgggctctcaaaattcatccctatactagtaataagtactgatatattacaagaggccctagatttctgaggcctcctcactggcacctatattcatggggtctggatcagtttcatgctggtttcccagtgatcagtttggagatcaagagctcccccttgttcaggtcagctgtttctgtgggcttcaccagcctggtcttgacccctttgcccatctcttctcttctctgcaactggattccagttcagttcggtgtttagatgtgaatatctgcttctattttcatcagctgctcgatgaaggttctaggatggcatataagttagtcattaatctcattatcaggggaaggcatttaaggtagcctctccactgttgcttagagtgttagttggtgtcaactttgtagatctctggacatttcactagttcctgatttctctttaaaccaataatgcttccctctattatggcatctcttattttgttctcctctattcttccccctacacaagcttcctgctcccttatgtcttcctcattcctcctcttctccccttctcattctcctagatccctctcccctctacctatgctcccaatttgctcaggagatcttctccctttcttcttctctgggggaccatgtaggtctctcttagagtcctccttgtatcctagcttctctggtagtgtggatcacaggctggtattcctttgctctatgtgtaaaatccatatatgagtgagtgcataccatgtttgtctttttgtgactgggatacctcgctcagaatggcttcttccagttccattcatttgcctgagaatttcaagatttcattgtttttttccactgagtaatactctattgtgtaaatgtaccacattttctccatccattcttcagttgaggttgcttccaggttctcgctattataaataatgctgctatgaacatagttgaacagatgtccttgttgtaggaatgtgcttcttttgggtatatgcttaagagtggaattgctggatcttgtggtagactgattcctattttcccaaggaatggccatactgatttccaaagtgtctgtatgagttggcactcccaccagcagtggagtagcgttcccctttctccatatcctctccagcataaactgtcattggtgtttttgattttagccattctgacaggagtaagatagaatctcagagttgttttgatttgcatgtccctgatggctaaggatgttgagtgctttcttatgtgtctttcagccattttagattcctccattgagaattctctatttagttctgtaccctgatggggactgtacttctgtgtatgttcatcttattgattgttgaataaagtactgtttggccaatgaggcagcaagttaggtgggactaggagttgaggaagattctgggaaatgtagtaaagaagtcttgaaatccaggcacgaagtgtcatagcagccagactcatatataagcaagggcaagaaggaagtcttgttcttgccctttccgctctctttcttcctccttctctctgctctggagtcaccatgtgagcccaggaagacaggctgccttccacaggcatcctccatatgattaatcttgtgattagggttgataattaagactgagctagcagatgagaaatcctagtcttgggccaagcagcatttgtacctaatacaagtaagtctctttctgttacttgggaccttaacgtggcagttggcagaacttgggtggcctggtggaaagcgcccatgtggcagcagggctcgggaggctttggcggaaagacttcttgttacagtacctcaccttctaattggattatttggtattttggaaactagcttcttgagttctttgtaaattttggagatcagccctctgccattttgtctcactgacacaagttatgatccaattgggattaacagacatctatagaacattccttccaaacacaaaggaatataccttcttttcagcacctcatggaaccttccctaaaattgaccatatacttggcaacattttgtaaacttcaacaggtacaaaaaaattggaagaatcccctgtgtcttatcagagtaccatgctttaaagttataatttaagaacaacataaattgtagaaacctaccaactcatggaaattgaacaatgtgcaatagcaccatttctgggtcaaggaagcaataaagaaagaaattaaagacttcctagaattcaatgaaaatgaagacacaacatacccaaacttatgggagactttgaaaacaatactaagaggaaagttcatagctttaagtgctcacatgaagaaactagagaatagccacaccagagaattgacatcacaactgaaagctctagaacaaatggaagcaaatcaaccccggaaatgtagaccaggaaataatcaaacttcgggcagaaatcaataaagttgaaacaaagaagacagtccaatgaatcaatgtaacaaagagtcagttcttccagaaaatcagcaagatagacaaacctttatccaagctaaccaaaaggcagagaaagaacatgcctattaacaaaatcggaaatgaaaaggggggacataacaacggacacctaggaaatccagagaatcttcaggtcatactttgaaaacctgttccacaaaattggaaaatttaacggaaatggataattttctggacagatatcacttaccaaaatttaatcaagaacagataagcaacttaaacagacctataacccctaaggaaatagaagcagtcatcaaaagtctcccaaccaaaaaaaaatgcccagggccagatggcttcaggacagaattctatcaaaaattcaaagaagagctaataccaatactcctcaaattgttccatacaatagaaacagaaggttcattgccaaactctttttatgaggctacaattaccttggtactcaagccacacaaagacacaactaagaaagacaacttcagaccaatatccctcatgacacattgatgttaaaatactggcaaaccattgtgccttttaagggttaattgtgttcacaggtcaattacctggggaagggacctccttcaggaagactgagtcatatgaagccacgataaagaaagggaagaaataattatctctttaatgagataacatgcctttcctttctagaaacccagttccctgtgcaggtaatgcagagcctccatgaagtactgttaggttctgtctgctgttctgagtcagaaagtcacactttccccttttcttctcctctgtctcattctttcagaagctgaccagcactcaagtatgtcttttctcctactttagacttttcactattttttagaagccctcgccactatgtggttgctcctctgccatgcagctgcttacaaatgatgtttttctctcatcttctcctttactctcttccaggcatgtgcaaagatttacagcttgcctacccttttaaactctaataaaattgccttgagttatcttctatgtcttaaattattttattaacaaaagagaccaaactccaaagagggtcccgatttctctgctaacatgtggtaactctgatggaaatatctaaaaatttctggcaagaataacctccccaaacagttagctaataaactcagacatttctggagagagtaaacaaccaggggtcaaacaacctcctgatcagaacctttctgtaggccaacaagaatgagtggtgagctggtggacatcaaaaccacaccaagagaaatgatgactgcaagagttaattaccactcaagttgacctcctggttatgggtagacttcccagaagccccaaaagtttgtgtttgtgatggctggcaagatggcatttgttaaaggccttccaatccacatgtctacttgcagctattgatattctttttttcaccagtcttattcttcctcaagttattggctccattggataactttagaactggcccttctacagttagacctctatgaaacaggcatcatcttacactactggaagctgtagacaacaaagaacactgcccagatgagttcagcatcatacagctagttaaggcagagctagatttttaaaattatatctagtcctcctcccctcccccaaatgttcatctgttcttgatgagggaaaaatagatcaaattattaaacatactgatcttatttatctaaatgatcttactctatctatgaagtagtgggaaatagctaccaagcactgaaaattatttatatgtaagtagaaggaatacaagtggtttttatccttcttactcataaagattatctctaagattttctacagttgaaatacttgcttttgtaacaaaatggcacaacaaatgccattctgaacaaggaactaggttatgaacatggtattaaattaggagttcaatagaaagaatgtagtagccaaattagtcttaattttcctcagggtcaaatggagaaatataatcaagtggcctctagaaacctttatattttaactcggtgtcaaattcccaggatccctcaaagaaaatctcactgaaattgtaattcaatccacatgtccttaaatttttatctgccccacatttatcctggattttagtcactagactccattcagtttctgtgcaaaggaatttgctgactcctggatttttccattctaattgactgagatgactccctcatcactgtgaaacacaatttaatgcaaatgggaacatcattcaacaataactataaatttatgacattaaaaaattatggttggaagttttgttactcactgtttctggagagcagccatggggccttgacagacatctttgtttcttaaaccatggttgtctaatctgtaaaacaggacattagactagacttgtactgtcttaattggatgctgaaattgagatggaaaattaattaaaaggaaatataattaaaagttaaaatttcagctcctttgacaaaccagagacatttgaaatgtttgatatctgtatgtagctggtgtctataataggagacaccttaaatatattcccaccctcagtaggtgacaaacactactgaatcattaaattagttctgaatagattgagaatcctggtttagagatgggaactgaaatcagggatgttaagatgacttgcccaaggtcatgtggcactccaagactcagattatgactttattcaatctcaggatttccatgtatattatattctatagcccaccttctaaacagacatacctccacccccttggttctagagaggacctagctgctaactgccatgtggggtctctatggaacctctgatacaaatgtgactgacagagcaatggtttctgcactgagcttacagtgtagttcagatcaaactttgcaaacttaaaaagtacagaacagaccatttttaatccatcttaaatattttaaaaatatatacaataagcaacagtatatattttggttaaccatatatcaagacaagaggtgggaagaaatgagtagtttttaaacatatttaaaattttatttgaaagaaaggagctagagtggtgtttcagcaggtgtgtttgcaactcttccaggaaacctaagttcagttcctaatacctatttttgagttgctcaaaaactcctctagctccagctctagaggatctgacacctttttattgcctatgttaccacctatgaaacatgtggcacataactactaaacatatatggatacatgtaaaccaaaacacatttttataagaaccattttaaatattctttagcaatattatgcttgtatacaatgccttatgttaaactcacgcttcaaaactctatcttatactcctctcactgatcttcttcctgtagccccactcctactctcatgtttcttttctttaaaaataaatcaggccaggccctatggtagtttgaatgtaattggccctcataagcaagtaaggagtggcactattaggaggtatggctttgttgaagtgagtatggccttgatgaaggaagtatgtcactgtggggtgggcttttttcctatgctcaggatactacctggtgtctcagttgacttcctgtttcctgaaagatgtaggattctcagttacttctccagcaccatatctgcctgaatgctgccatgctccctgccatgatgacaatggagtgaatctctgaaaatgtaagtgaaccacctcaattaaatgttttccttataagagttgctgtagtcacagtgcctcttcatataatagaagctctaatacaggccccatgcaggcaacacaagttaaagactctgttataaccaccttgtcatgtgaagatagtaatattttcacccttcagctccaagttcttctaccctcccctctctactatgtcctttgagatttggagggttgaaatacttgttctgtgtggagccagttacccaggtgtcacttattctcagaactttgatcagttatgaatccttactttgacaactacccactgtcaaaagaggcatctctgatcacagctgagacctgccttattctataaatagaaacattaagaaggcaacttatctacatttacatttgcaaaaccatgaataaattctctcaaagggcttgaggtctctctagccataggttctcaacaagctcaatagtgccaggcatgtatttccactcattgggtctgcctcaaagccaatcaggaagtggttggttacccttataacatccatgccattattgtaccagtgggtatatcttgccaggcagttcactattttagcatgcaggattcataactgggtgtgatcaataatgattcctctcctccaatatcttgcatagcaatatacaatactatgaacactagccagcaggaagctttgagcttagcttagtttctctctgtcctatacatggaatgtgtgatggctttatcaatagagtcttactgtcatgttctggtggacatccaagagcaatgagactagcttgcattgttttggtcatttctgggtgctgcctaaccaacaattcacagggaaacatcttgcatctggcactgggatttggggtttgaaaacttaagacttctgacagcaatgttaaccattgatagagagcacttacatcatggaacctttttcaagaccatatatttttagttaacttgtaaagtcgtgggtttctatattactctttcatacatttttagtcttggttgaccacctctttgcacattacacttctgatattttccttttagcctcacctcccttagtgtttcttgtgtctactttcatattaatgagtactattattctcctcttgcctctcccccacagccgtcttgatttcattcttgctaccttcctcgattgatactcacttgagtctaaggtctacatatgatggagaacatacggtatttgtttttctgggactgagttagactacttcacttagtataatatttgtctttctaggactgggttagaccacttctcttcatacaatattttccagctccatccattctcctataaatttaacttttatttagttatgaatataatttctctctgtaaataggacattttcattatctcctcaccagatgatgaccaactaggctgatttcacttcttagttactgagaacagggcacaaatgaaaacatgtatcataaagagtcaaagactattttccactaactgctctttgcctatctcttctctctagaagagatattgctgggataaaatactctaaccaaaggcaactgagggagggaagaatttacttcacttagacttccagatcacaggtcatcactaaaagatgccagagcaggaattcgaggcagcatcctgaagcagaagccatggaggagtgctgctttctggcttttttactggctcatgcttaactatctttcatatatagcccaggactacggcactgtggaataacatgcacagttgtctgagccctcctgcatctaacaacaatcaggacaatgatcaaaacaatcaataatcaagacaaagacattctcacagatcaatctgatctaggcaactcctgaatccaggctgagtcaagttgacaaagctaactaggacactttctaaagcaagtccatgcttcactttgattaatagagagattatatgaaagaaaaataattatggttttattattttatgatagcatatattactttcctgtctgaggatcagtctctattctaaaactcttccttttatatggctcatttgccaaaattgttattcttttgcatgactgattttccctgtgtgttcccaccaaagtgttagcacaactggaatactccctatcaaaattctcaaatatatatgagttgatagatgcatctttctcttagttttactttttattctcattttctcagtgtttgtcttgaatttttaatgttgttgcatgatgttggaacaacacatagggcagttgggctctgaacatagtttattaaatgaatatttggacatattctcaaaataagatgcacctaggcagtgaggaggtatgccgataagcaattaaaagaattactgtataccagaaaaaatgtgcaaaggacaaaaatctgatgtaaacaggtaggagatcttgacattgggttggaaaatcaagttacataaatataaaatgggtgatcaaaagcggtcgtcaatccagactcaatacaagattctatacttttctttgtctcatcccatgcttatgtctcccaactgtgatccttcctgtggtctaaccctctggttctacaaatggtgagatgaaatgacttgctcatgcccccctcccctttcctctatctggatgttttttcttactgtgctaagtccttgtgctactttccttaggacaaacaaggaagcaaatgactggcccctgaatttataaaggactcatgtttcagttgaaatagtcagctgttaagaactcaagcaactatgctggaagctccaaacatcaggtgtcagtaggtatggcatgtgagatcttgaagcttcactctggcaaccttgtggttgaccaccaagatagaagcaatgcctatgacattctttggccacatcatcgtcaagaagtggccttctctttattgacagcatatcgggtttcatcacttattataagatcaattgaatttccttgttttctcatctcagagccaagagagttgagaagaggcacaagtagattctctctcctaagaagtgcagcagccctacttcttttgtttctccattttttaattaaaattagaaacaagtttgttttacatgtcaatcccagttccctttccctcccctcctctcctgccccccaactaacaccctatgtatcctataccctttctgctccccagggagagtgagatcttccatagggggtcttcagagtctgtcatatagagggatactcccctgagcctagacacacggggaggacctaggccctatcccaaaggatatgaagatctacttcttgagtagacatgataccatcccatactcagtagaatctgactcatcttcagacagacttctcatactctcttctccaggatggtccatcagagacttctcctgttctctcaaaaggctgggtggaacacaaaatcttgtgatcagaagccacattctaacaacaacaacaacaaaaacaccacaggtttccgagagcagagggaaagcaggccctggtctaactgcacccctgggatggtgaacttgaaaaaataatttttcttaatcactggcactctcaaatacctttggttccaaattattgttctgcctcagaaactccatttgcttgatgtcaagtgtctgtgatttaagtctgtaaactcactggaattcagagcgagggcagtagctcttcaatcctgccagcctctatatcctggcacgtgtgtatttgtaatgacaaaccgacagtgtttctgtgcatctctgtgatccttcagtgcgatgggaaagccaatctgagctctgcactctaaatcacatttggaataggaacatttacttagccaatcttgttcctttcaccattccctcatggagaaaatcaagccactcaactaaattacaaatccctgccttgtgtaaacacattgcatgtgccatgagctagctaatgctgacagggttcagcaaaggggcaaatgtgtgttaaaattaagagtaacagaatccatcatgggactacttagaaatattcttaaagaccaagtctctgataggttttactaagtatgaaacgtcccctgatcttagacattccacatgtcaatatactgccatttttaggaagcaagaggattggccccggagaacagtaagagctgaagggtttgactcctagagagaggctatatatcccagaacccagaagcccagtagcccttttaagagtgcccatcactcaatcagaaatgattttgtgtttgttttatatgattccaaagcatgagaggacaacaaaattccaatcttgaagagctcggggcatggatctgggtgaaggtctaaattactttacttgctagttatatgcttagggaattgctctaaaatataataccaacatctagcaacatccccaaaatccagaaatcaccaagcctcacagtgggcagaacaatagagagattgttaagtttattctcttttcaaacaacaaagaaagtgccttaaatcaaaggtgatatctagctaaacagctatataatgtgagttgatttatgccaattaacagaatactttaagttctttcattttgcaatgcaatgtcttccagtaattagcctcactgctaagaacatatttatatattaagtcactacgaactattttaaattcatattatgtggctgttacctatacaaggaactgttactttccttgacccatggcctactcataacagcaaataaaagcttataattttctctagaagagtttcttgtagcacattctgtttaacgactttaccagagggtgggtgctaactgttttatttttgccttgtatgctgatagaaatgtaccatctcactatctaaaacataggtaccctgaaccaaaaacctgtgcaatattttaaacttaaagccaagaaagttgaaaacagaagaaaagaaattaaaggggggagaaagaaatagtatgtcattgataagtatatagttaaaatcaactcctcattaattgtaagatgcctggctgcttctgtgcaaaatgaagaatcaaaattgttttcattgatcaatttcaatgaattgattcattcattcattaagaggagctaagatttttctcagtatttagaggcaaaatagttgaaatagggtagtaacagatagaactaaggttcttgagagtaaaactgtttttacaggttcctagtgtcttatttggtatggtacatctgttacatagtgctaaaaactggagtaaacaatgataaagagaaagcaatcatcttcacacagcatagagaactctactacaggatgggcaaaaagagattcaagaatgcaaagctgggaaatacggcagatgggtaggtgccaaaattgttttacctgtatcagaaaagacaaaatggcccaatgtttgtcaaagagattggtgtaaaactcaaatgtaaaaacatagctgagctgttggacccaattagctgaactgttcaatgagctgaactgttgcaaccaagaaagtggaaagccagtgtgacaaccaaggcctagaagccagttgacaatgtggaatccagaaaaatttaaagaatttggaatataaggaagccagggtagaagcagtaagtctatgaagcaattccattttcagggtctcttctcaaccctcacagtcaaggaattgttcctgccccttcctggaatagatgtcccaggctgaaagaaagcaatccacactttgtcaaaggctggtaaagggcaagccttgggtaccctctcccattataagggttaaagtaaagcatcattaagggaaattgggtcccattggctgtcttcccattaagagctgcaactgactggctccttaaaagactgacaaaccaggaagagacaactgggctcttttgtgaataaatgggctgaaccaggggactgtcacactgagaagtcaccaaacaaaattgctaggtatacaaggatccttgtatatgtcaatatacagagtaaaccagcacctgcccaggtagctagtgcccattcttaaatattaatcagcaggtgaggaccacaaggcattcacaggaagcatctattctgtctgcaaagacaaaaccaaccaataagagtgaaaaggaatagacgtagcttgaaggaaacaggcagtgtgtgggacagaagaaaggagcaaataagatcatctcagattgctggaagaagagaggacaagaatggcccagaatgagaaatgaataaagatccaaagagttgcatttttttaaggtacagttaacagctcatttccatgcagcacttagaatataaacttgagggaattcccctgtaatcggggcaacaacacagagagatgggaatcagaagaggaaaatctaaggaatcaagagggctagtgtcatgtgtcaggtgtcagtgatgagatccagaagggaaaatacagaagactaaaggaagaaatctactggagtattttcatagatttgaagagcatgaaacccaggcattaagacagcagagcgagctccacagtggccatgtgggaagggaggtgactcagatttcagcacttagagccagaactgagagcaagtctccagaaataacactttaaactgcaggcaaggactgagtgatctgaatgcaatggactcttcagtcagacactgaagaaaaaaaagttcagagtcatattgccaagatgccagtttccatcacagaatccaacgattgccaaatagctagtcaagaatgtagatatgcctgttctgggaggggaggggtcaactgccatccactgggagctactggacatgttactatactgaatggtgctacaaagctaagaaaaaagcagaggctctgggcagcagaccaaacaacaaaaaaaagactccaccaagatggaggcctaatggtctccacaaaagcctgagaacagctgtagagaaggcttaaagaagccccagtcttcataggagcagaaagacagagttgttggccttaaaaagaaacacacaggtagatagttcagcagctaggaacccttgctgagcaagcatgaggagccgggttcaaatccctagcactcttgcaaaaagttgggtgtagctgggcatgtacttctcaccccagtattgagggagatgggagaggggaagtaggaggggctagaaataaggattgttggggctttctggctgtttcaaggacacttgttgcccctgtattttagctactatgaatagtgatgctataaacaaggttgtaagaaaatttctttgagattctctttttaatcatttggataaagagtcaaaaaagaaattgcattcactactactgaatgtaaaaaaataaatagattaattgttaattttattaagtatttcaaaagtcagtcatatagttttccataaaagacatgacattctacatcccacaacatttattccatgatgttcagatagttgtatgagatgatatcccatgtggtttcatttgcatggctttgagatgtagtgacattagtgtcttttccacatcagtttggcactctaaaactgtttgtgggaaatggttaagttctcggcccgtttttaaaattgggttgtttgtgttttattgttgttgagcaacagaagctttgtttactttctggatatgacatcttagcacatgtgtggcatgaaatatcttctcccatttggggggttgtctttttagtctcttgattgtgtccttcaattgcacaagctttgatttcgaatcaatctaatgtttgtagctttgctattgcagcctgtgctttagggcatcatatccaaggacacaaaggcaagtctaatgtcatgaagtgtccctccgttgttctctgaggattttatagtctcattactataaactataagtttgataaactttaagtatatatatatacatatatatatatgtatatatatacagtttgaatatataatatatatattaaagttatatacacatatataaaatatactttagtggtgaggtgggggtgttttgcacgtattctccctgcatgactgtctgtgcaccaatgtacatgtctggtgcccacagaagccagaagggagcatcagatcccctggaatcagagttacgggcagtcatgagctactgtgtggggcttggaatcaaatatggattctgtccaagagcagcaaatgctcttgaccaccaagccatttctccattcccctgtagtgtacttttacatctctactctgattaaaatgtttactctgtttacatttaaagcaattacttcctatcatcattttgctagttgatttattgacttctgtgtgccttattttctgtccctcagttcctcctcttcttccctcctttgtgtgcagttggtcattcatcacaatgtgctttcattcccttcttacttgcagattctgtacatatttattctgttgttaccatagggatttcctgcatgtcctccagttacaataatcagttgtaaatggctaacaacagcaatcacacataaaatggtattcctatgcagatctactcccagttttgtcactgatgtcacttatagatttgtatgcatttgagtcatatggtcccataaataaatatttacatttttatgatctttccttataaattccaataaagagaaagattctaatatgattcagatatgacatccaatggcatgagcatgaagctgctgacccccagaaaacactggaaaatgactgcagctgaggaacaacagccatttgacagactgctgttgcctttggtgagagctgtgactccatgcttttgttgattagatatctcaagttcttgtccaagatctggtgacaaaaaattatagcttgtcatagaataaaactgggattgtcacatctctgagatgttttaggaaagccaaggtggaaggataaactgtttatccacacaggaacctgcatgaagcccaccagtggggagtgggtgggaagtaaaggtctgtctgctcttgacaggcatctctgtccttgataagatccatgagtttgtgctttcaatgaatccattcctaatgaatggacagtttgaatgactaaaagttaagatttatggcaacaaaagactctgaaaatttgaagatcagtaaaattatccaatctgaagaacaaagagggtaaaaattcttaagcatttttgtttattggagacagagaggtggggaatgccaaagtcttagacaccattggaaagtgagctgttctccactgcacaggaggtagaaaccgggtggagtggaataaaaataaaaatattgaaagaactaatatctgcaagcattgtctgcactcaaatgtttatagcaggtttattcataaactccagcatcagacccaatcaaagcctccttcaacaggcaaacagatgaataccagagtgtgcctctaccatggaatatggtttagaagcttgaaaaagagctagcaagctccagatcacggagaagtctcaaatgcaatttggaaggaaaggaatatattctggggatgactctactagaatagttcagtatttaacatttggggaaagacccaacaagagagacagtaaaaacacgatcaatggccaggggctgtggatagataaaatgatgaatgtgcccaggggacatttttagggaagttattttggatggtattatatcagcatgatctgttaaagactcacagacctgatataggtctgtgagtgaatgcaaatgcacattttcaaattcaggcaatacactaactgtaatcacgaagggtactcatgtaagatgttactcacagagaaccaggcaagagagaaacacattaattaaatgcactaaacttctccagaagcaccttaagtgtgatgaaggatgacataaactaagccataactcggaatgttctcagtcaacttgtgtgcgcgcattgtatgtgttgtactgaggagagcgatgacttatgaaaacttccagttggaaatttgaaatggacagtggaaaccactggaaatgaattcctctttaattcaagaatctatgaggagatatgtgacaagttactggatttgtcctttctctttcctaaaagctcacccaactctaatctgccacatgtgcatgttatctttgctgctgctatgtgccatgacccaggaaacggcaggccctttgatattaggattcagggagtgagatgtgaagggcagtgtgagacatgagtgtcagaatgtacaacagtgtatgcaatgggattcctagccaggtatcaagatggggaaggttggcagggcaccaaacccttgtttccaaataattaggatttggatttcaaactgagtatgtatgtgcactattttgaccagaataggggctgggacatttggaactcagcagtactatgttttgtctctgtatcactgtagattgaacagtcctcttggtaaggccatttcttttcaataggtcatctccaatatttcttcttggatgtggttctccatagtaattcttcaaagaaagtctcaaataaaagagcccctagcaaggtccacagttgtctgtgacctgaagtgcctgtgttgtctagggttttttctttcaaaccataccctccttgtgattgatcacactaattcttaacatggatccacgagagctggaatcactcatagaacacgccagacccttggacattatttgttaaaggaatctgtgaatacttaattaaacagagaatgatcatagatgaatttaaaaagttcagaaaaatggatgaaaaaagtgatggaactaaatgctagcatcacatgtgcacttaaaagatgaagaaatgaagactgctactgagaaagaccctgtaagacatggtccctgctccccacattcccttccccctgttccccagacttgagaacacatacgtagcagaatgtcaaagaacggcccaatatgattacaaaatatgtgtaaataattatttgaaattataacttttctaaatacaagtaacaaaactaattattctcctagattgttacaaaagtaactgggtatatttttgcactgttgcaatttgatgttcaatactgaacacattcataaataaacatagttatgctagacatcatcttaatgcatatttcttgctatgtttttttttgctaatgacttgttacagcttattttgtatttatttcatacgatggaaacaatgtcagacaaagtaacgtaaactttgttcttgatttcaaaatgggttgtgaaactacaaagagaacttggagcatcagtaatgaatttgtcccaggaatttctagcaaacctatagtacagctatgattgaaaagcacttgcaaaggagaacaaagccttgaaaatgagctgcataatgtctggcaaagctgatcctcttacaacaggtggaggtgcccaagaactcaacaccaattatccaatggtcatttggcaactgaagcaaactggaaaggcataaaagcttagaaagtgggtacctcatgaactgatcaaaatattagttttgaattatcatcttcttttattgtatgttaccaaaaaacccttcttaattggattgtgacttatgtaacaaccagctatgaccaggttggaggttagatcaataaactaaagcacttcctgcaccaaatttgtatgaagaaaatgtcatagtcactgttgggtgggatgctctactaagtattctgaatcctggaaaaaccaccatatctgagaagtatggtcctcagttgagagatgcaatgcaaactgcaatgcttctattggtccaaaggaaggcccagttctccaatgctcatctacacttcccacaagcaacagtttggaacttgaacaatttgaactacgaagatttgtcccctctaccatatttctctgatatctcagcacttcttccagaatcttgacaattctttgcagggaaaacatttccacaacttaaaggatgcaaaaaatgttttccaatagtttgttgaatcctgtaacatggagttttctttttttaaattatttttattcttctctctgcgcatttgtgtgtgtgtgtgtgtgtgtccatccatctatgtgaatgcagagtgtgtggagcccagagaggatgtttgatccactggaactggagtttcaggcaattaagttgtcaccacatgacaagggtgccaggaaccaaactcagatcctctgaaagagcagtatgtgctcttcaccactgagcccactccagcctttgaagcatggatttttatgctcaagaacaatcttatttctttttggcaaaatattagggtaatgatggctcctattgtgattagtgaggtatacttgaacatagttataatgaatttaaattcatggctcaaaactgcaatttcctttgcatcaacctaataaagtacctagcagttgtctacctatttatctatctagccacccatctagccatttgtagcaaaccatctgacctatctaaataaaattttcctattaatttaccatccttgcctttattgttgtagaggtacaatatgtttactagactggtttgtggctcattgccatgtgaatatggatgcctctatggggttgttctcaaaaactctcacggactcaccttagtggtgttaggatagtgttgggacagtttacacctcttcagcaggaacatgtgttatattgctgggatagctgaaagcatttacaattaagaaagttatatgtgttggtcctataactttaatatatacattggctccatgacttctaccaatctggttgcagattcatgtgtatgcaaattagcaaccgtagtatatttgcacccatgggatgtggcatttcactaggcaaaggttatgtgataagcttggctagaactgagtattaagagtgggtactaaaccttacagtccaaacgacctcacacactcattatgtgtagatgagaatggtatctgcctactgcagttcagtagaattgatacttgtgaagaggttcacacaatgctgacagcaccactggggagagccactaaaattgtgttttgttagtttcagcattgttgatacttcagaggcattgatattgtatagggtttctgaataaaaagtcaagaagaaaaaaaaagagtgggtactaataaaaagaatatacatatatataatatatataatctcatagaatgaattgtcaagaattttaaataatctaagtcataaatttcttaatatttggtgtgttgggccaaagttctgcaagacacattgataactcaaacttttaaaatttattgtgatcagtgtgctgctgaggaatgcataatttgggaatttaacacctgattagctattaaatggctgtcaggagaaaattctgcagtaatcagtttagcttttagcccctaattatcacttcacagtggatttggggtgagataattgagaactgcaacacttaaaggactccagttgggcacttcttaatacaatgaaatgaattatttctctaccagggttgcatttagcaggtattggtaacaaagaaagaaatgtgatagtgtatgggatttcataaagtgatttaaagtagttgattcattcattatgcaattaagtggagctcagctgtgtataacttacctggtgtctaagtcaaagaatgtctttcaaaactccataaaatttgttgaaaggatttaactttaatcaatgtttggaggtttggagttgctgtctgaactaagtaatagattcaatcctagatattatgaccttgagctggttcatttctttttggtttgtttggtttttttggggtttttttttgttttttttttgatttccattctacccagtgaccaccttccatatatatcctattttcataccagctctgagaagttaagccctaatagatagttatcactcactgctagcatggactgttcaactgaacatgaactctgtccagtccttacacagtcctctttcccagggtctttgcgattgctcactccaaacacacacacacacacacacacacacacacacacacacacacacacacacacaatcatgccgttgctatcactactctctgatcctttagaatcatccaaattgtttccaatctttaaagttcccatcaaatcaacaagtgacaattgaatgacttctcatgacaacacattaactacaaaaaaaccaatgtgattcaatctctgcttttacgcaatcttctagggcacataaatagacatgccacttagaaagagaaatggcaggaccaatttgaccaattctgtgtacttaatactggcacttcattcatcccacctggaataaatatcttgacattttctcagtttttccttattcaaggagcagtgaatgtactacctatatatcatattccttcatctatatcctgatttatacaaacaatgtcagggaagtaggatatgactgtttatctaatgagcagtccacagtacacttcttcactgagacaagaatcctgaactgaaatggggtaacaaaactcctagtgctagaaaaccaacggtgatcagtataacccaacagcagcaattttacccttgtaagctaattttttttttagatccatacacacacgggaatgaagatgtggcatggttcttatatttgagatacacaagagagcaagcatcatggcttctggaagtaaaagaagtctgtcttatccttttctgctgagatgttggtctaagtgaaagctgaaccttcactggagactgaaaaatctgaatctacctgaaggtcttgggaggatttggggtttgggataattagaattgctggtgtcatatctgtattccatggatgttggtttaaaatgttaaggagttggcataactcacttgtctaagggcactgggtagctgtggaagccaccagaaccatgggtgctgaaactctggagagggaaggtctcagagatgagctgactctgtgaccattttcacactggtgccatttagagaatctggccttgggcaagaggtttggattctgggatgtgtatcagcttccagagaatggagaaacaggcagagtttgggactgcactatagtggtaggctaggagatgtcagcctgtggatggtttttagttaaggacattttccaggttctggaatttgctagggaaggaggctgaaaaactaaggagaaagctgaaaaacagagcaaaatgttgaatcatttcatgaaatagatattgggattcagtgtccacccaaagtatattcaagaagagagaaggagtttagttgaaaaccttcagtatagaccaggagatcacagacaagatggcccttactaggaattccaactttcatttggcttggccccaggaggccaaaacaagagaatgccattcctagtggagaaagaaagcattccttcctcttctttctagcttagatttctcttttatttattctctctgcctgccattcctgtctatcctttctctgcctacctattggctgttcagctctttattagaccaatccggtgccttaggcaggcaaggtgaaacaaatgcaacacatctttatataattaaacacacatctttacatcattaaacaaatgcagcataaaaaagtaacatacctttacacagttaaagtaatattatgtagcataaacaactacaactcatctttgcctagttaaaataacattctacaaagctgtcatgttcagatacagtagtattgctttgctcaaataagttctgccaaaatttatttgtctaaggacttctcctgttaacaaaagccacaaaagactggaaaaggggcatttcaccatgtaggaactaattcaccaggtggataccacaagccttaatctatttgcactaaaaccttgattacaattatggaccagtgacagtccagaatctcattcaacttttcctgttaataaccagttcattgcttcgttaaatggctgttaggactttctggtgcatacactttatggtttccctggctcacctacttaccaggcagagaactagaaatcatggttctccctttcctctatcattattgctatttctgtggtctaacaatttctaccttgcctcctctcaatttggactacttgacctatatgacagtatctaaaattattcacctgtctcctcatggtcctgcacagtgccacaccaaagtatcctcactattatcatattcccctacacacatacactttgaaagatttgctatctggtaactatgccactcttcctcatgtcctgtggttcctgtaccctaaaatcatctttcccagactcccagaaatcttacctggtgtgctatcagcccaccatatatatacaagtgtccattcattttgaaaatcatggtctgatctccccaacccttggaattaacaattcttcctcagtgatccacatctccaacagcagttactctgtagtctttttcatgtctgtctgcatttcccttccatcatcgagcccccttgaattggactgattttcagagtcagaaccatagctggtttgtccttctgtccccaggatctaacacaaggaaaagtttataacagtaggaaaatgtttgtagatgaatcacaatctctccaaagtaactgatcagattctgctgaagtggaaagacaccttgcagaccgctataacccattgctcttagcaatgatgggaatggaaacccaaggttactaaaagacctgggtagagtcccacagcagcacatggcaaggatgagccgagtcctcttgatcacccagcatgccagtgttgcaacatctttctctgtgaacagctttaatattgtcactacagcataactcagctttattttgtacaatattgttcatcccgcagctggccaaaatgccttatcagtgaaaggggaaaattccatagttaaataagagaaagaaattaactactgcaggtgcagacgggaaaatgttaaaccaagttcaatttggaagagcagttttagattcatcacctatagaggaacaggaacacaacatgggtactgctttgtgcacgatggccacatgcattgtgtgctgacagaatcattttacatctcaattaagagagccagatcagggagtgtacaatatggtcaagcgccatggctggggttgacaaagtccctttactatagtctctgggggctgttgaaataatgatgcaaacccccatttcagatcactctttattcttgctgacaacatatgttgaaaaactgggtttcttgttcagctgcctcccatacatttgctgttgagaagaacttggactccagcctgccacagtgcccctggactcccactggagacacagtgggtatctagatgcactcagcttccggctgtgtgactgcaggcagccaaatccccagatgagggattgttaaacaagttggtgattttcagctgaaggataccagccacggaagtttaaagtgttcccatgcaaccaaggctgccagtgaaataccaatttctcctttttttagaacaattatttcttttatttttccccagacgaaccctcagacattcttctcctcccttctgaggcttctctttgaaagaaccagtgccgtagatcatgcagggctactccccagatagagctgctgaacacaggtgcatgctggggcttcggtgtctgccttagtctctgatttgttacaggaaaaagactcactgtagttgcccaattcccctgagtggatactttgaagatggagatgatgtattaattttgtgtttttacagatttatgctttatggacatacctatatttttctaagcaatgaagcaagaagcgacttcgtagtccaaatgtcagaaatgctgtgagggtggtgtccagcattctggtttcattgagagggcacaaaaactgctgaaaatgcaaataaagagcctgttgtttaacctagggttgggaggaaatcatgtccatacttcatgttgttgatataaaaactgaaagggggacaggctactgtacatgtgcagaaagttaaataatttggcaaatggggactctgcttcttacgttagctctcatatcatcctgaaatatcagatctttgtccctgagagtttgggcaatcatagtaaaatataaaggttttctgatgttttcaaagctttgaagaagagacctgtgagcggcacaattgtgagaggcacagtcctagggtaaaaaagatttggaccatcaaccaaataagggaacagaaggtatgcaagagacacaagtactttgcttctgcgcctttgtatgctacttgaaacctgtttctccacgatcaagagtcttcaacattagtgacaataatacaacctagaaattgcctagcaaaatgctttaccattttcaaggactttatatttcggtttcttctttgaacccttcagcaatcttggaaaccagacaaggacaatccatagccccatttagtagaaagcaaacaagatgccactgacttattctggctagggaataagctggcactgaccctggatgatgagttggtagatgtgttgggaacaggaatggggatatttctcgtattagacactggatgctggattcagttgccctgatcctgttgctgcagcatttgttctccaggcaggagagtgttagttagcagcagaagccctccagccagcctccccttctgggattgcttcaggtacaaagatgcctcacttcaattcatgcccaaggcagggacctacagtgggacactgttggaaggggccagccactttagccaaactctaaacaactctgagaaatcagcttggcttcagagtgtattgtagtttgtgaatgacatgatactttttagttaccccctctttcagaggtgtgagcccaagcatagcttttatcaaatgcctttgcttgttaaactggctcagcgttgcatatttggctactcaatatacactttgtgtttcccaggctgtccaagggtgaagctggcagctgggatttgtggctccatagctcacccactgccaggttgtgtatctataatcaattgattgcagaggtgacacattctccatgaagaaggtctgtgttacacaacgagaagtatgcctagtaacgattctctcactctttcctcaaaaagaacattagccatttatccagctgaatgcacactctgggcaaggggatgtccaaacactgttgaagctattaggcatagggccaatgtatcagtctattgagaatgatataatgaaataatacagaatgagtcttttataagtaatataaatgtattgctcacagctttggagcttgggaaatcccaaatcaagttggtagcagattcaatgtatggagaggcctgtttgtagatgaagcttttgtgctgtgttctcagttggcagaaaaggcaggtggctctctcagacattgcttatactattttaagttttattgtgtgtgtgtgtgtgtgtgtgtgtgtgtgtgtgtgtgtgtgtgtgtgtgtgtgtatgtgtgtgtgtacacatgtgtgtagcagccagaggaaaaccttgggccttgttgtaacatacatatatttttttggagacaatgtttctttctgacttgatactctcctagtagaataggcttgccggccagctagcctcaagatccatctgtctctactccccgctatattatttgttcccactttttttttttaacatgggttctagggattgaattaagattctcgtgcttggacaccaaacaagttgctaactgagcttttataaaggaaacaatttcaaaggttccacctcttaataccattacagaagggttttagcaagacctcaacattaggttatgtggtggggctatctgaagacctaaggtggacccttaatgagaagatgtcttagttagggcttccattgctgtgataaaacactatgatcaaaagcaacttggggaggaaagggtttactttagcttacaagtcctaattacagttcattacgaaaggaagacaaggcaggagctgacgctgaagccatggaggagtgctgcttatggctttctcctcattgcttgctcagcctgctttcttataacacccaggaaaatttcagaggtgtcgccacacacagtgatctgaggtctcccacatcagtcgccaatcaagaagatgtatgaaaggcttccacacagactaatatcatgtgggcattttctcattggaggttctttattccaaattaactctagctgctgtcatattaatgaaaaccagccatcatagaaaggttggttaataaactgaatcctgaccaagcttcagttcatagtggacccactatgttctcaaaccttgagtttagtagttttctcattctccaaatatagaattggaagagatatttgaggtcaacatagttcccacagtaggttctttagctccagggaaaaaaactaccttaaaggaaagccaaacagaaatctctgaaatggattcttctctctacttctccccaagaagacaggtacaaatcatattgtatactaaacattagcagaaattagtatgattcatgaggactacatgatgcagacatgcttttatttttcatgttatcatttaatttaccagtctgggctctgaagaaacaagatacatcccagcatggataataacttccccatagcttcatagatggagttctctctaaatttagttaaccttctgtgatctgtatagtctagcacttcccaagatcatgaagagacacccagttaggacagaattatatacatatggccaggaggtgcaggtggaagtggctagaatctcaggtgaagatccactggccctccccaaacccactttctatgagggaatgtcagcagtcaatgatctcagtctgggagtttctcatcagtagttacagctattctgatgaagatgctatctattatgctcagaagatagtattctataacagctgcactgacttatctctgataatgttattatggagttgtatgaataaggagtagctagtactttagaattcttattgaatatatatatatatatatatatatatataatatatatatatatatggtccagaagatagatacatctgacaaagaacaagaggcctgtcacattcataaaacttagaaatgttcagtgcataaggttattctgggacatcctatccaaactaaaactccatttcattatgcctcataaagaaaaatgcccagtacctgttaggccttttgtgttttccaagcatcatattttgcatatatagaatccatacatagaaagcttccagtttttagacaccaaaggagaaaaaaaaaactgtgcatagcagtttcacactgaaagcatcttatagacactatgactccataagcaccaatgttgaagaaaaatagagcatggtaaataccaggaagacaatatcaacacagatgcccgagtttctcaagcaaatccatatcatttgaattttgggaattgtgtacctactggaaaataattttggcatgctgttgatactgatagatatgaagtatttgggctttttgaccatgggaaatcaagcaacttcaatttagaacaacctaccttaaactggctcctatctggtccatatagtaataaggtcgagcaggtccagccacagtatattatgagaaggaagtagaatgtctgaaataaatcaaaagtggtgccaggggaaatgcaagccagctgcatggagacctgacagccgtcatccatcactgtgcattagcattgtctcagctcacagacacagtcaggtggggtaagtaagatgaccaaggagagaagagcccactttacacacatgggtcattctatcttcccatgccgaaagtggaattatgcgttgtattttcacccacagttgccttaaagtcaattcagagagtaactagtcctaatgagcagaggtttgggcaatacattccttctgccctgaacagataagagtttaagaccagatatccagagctcgtacacttgggggtctatggtttactttaccagaagaactgacagctaaggggagcagatgcaggagaagaatatgagaagaatgtggcccgaagtctaaatgtgtccagatgtacaggaagaggtgaatgaatgaagaaatggagcggctaagaaggtagctttgggggtgtcatgtgttcatgcatgagcatactaataagaaaattttttccgcacatgttaatagctacccagaagtttctagatcagagaccataaacaagcaagcagacaagatgacatggacagttcatgactgctaacctctgttgcaggtcatcctggttttagtgtcatgagtggtggaatgactttgccatgaaaacagggatgggaatattttctgttttaaaataatggactctcggccagatggtggtagcacacacctttaatcccagcactcaagaggcagaggcagaggcagatggatcactttgagttcaaggccagcctagtttgcaagagctagttccagcacagctagggctacacagagaaaccaaaaaccaaaacaaaatcatggactctcatgtacaaagtatgacctttgtatggccattgagtatcctacttaaccaaacactcaaaccaatcttcagttgctgatactgtacattagaatactacttagtagcaaactaactacaatgaaccaattaaccttggaaatgactaatagttgctaataaaacagaattatatctcaggtatccatatgttttcttgcccatgaagactcaaaacatatctatgggcttaaagtttctttttttctctaccagcatagagcaatgtagacatgttaaccgggaccccaaacagcaaagactcagagtttatagatcatacagtcatacacactgatcacaaaatacctcttaccatccagacacagcaaatggctttcagaaggcatggtaaaagcactaatttataagagatattttacatgaatactgcaccaatgcctgggacacagtagatactttgaatcacagacctgtatatagaaccctgtccccagcagccagaacacatgaaagtaggaataaaaatacagaagtagggatagtctggttaccaccactccttgctggatcactaagcaaatgtatgctttcttcctcacattaggctccatgagtttagcagtccctggtcacacaagttggaatattttaatcaaaagatacagctaaactgcactcaactataagacagagcttcactatgctcattccataattcttgtgactagaaaccagaagaaaagcaggaatgctgtattttcaggggtaactgaccattcttcaaaggtttttcttatacaacaggagcagataaactacatttaccatactggaaatccatttgggtaccttccggtactcccttgcctaatgttgggagtagatacacaataaagtggcctagatggaaaaggtactgggactaagtgtcacaattttctcagcctgaggcattgctagaagttaaaggatctgaaatgggtaatgggagagtgagggaaggaactgctgaggttctgagaccagcttcctcagcagaggctattccccaccccagctttcatccccttcatgaaaaaataaaagcaactacaaggaatctgaagaagtttctccttgaatgagaattcaagaaatacaagggtagctatgttagatactgtcagctatcagcaagttctcttttccaggagagaaattttactctatataccatgaattctgtttgggggaaagccttcacggtccccaaagcctcagagagccacctgccccaagtccatgcccttccttgggtaactgacatccagtgaacattcggtgacaactttatatagtttgctggttcagcaaaagttgagacaatgttgacaggtgatggtagccttagattttcttgtgggactggttgaagtttccattgggttgtaaaactactgaatttcttcttgttaattttctttctcttttctttcagatgtataccccaatggcatactgtagcaagcatccttcatgctaaagtctacctaatattttaccttctagataataaacttgttttttcaaaataatttcatgtatgttgtctcttttttccctttgtagtgatcctggtagctaggcaatgcatacttcattttttatatacaacaaaaaagggcccagagaagttaaatggggttttcaacatataacagtagcgcttaccactgacaggcccacctacgacacgcccaccacatctccttttcttattctaccatgtgtcttttctgtgcagaaggagtcagactaggctgcagtttcatccgtctgctatgcaacatgcccagatcttaaggctcattttctcaaagtgctctgggagatgtagtcacagtcccaccaagataaccagtaagatgggggtgttttaatgaagttttcacaatagactggtcctataaaggcttatttaaaagtaggccatgcaaataaattgcaaaggatgtcacatacaatgaaaaacctggtgatttaaaagtagtgaccaacttcaggatcatcttatagacaaaacataataaaaatgaacaagaagtttggtgttagtaattgcacagctaactcagtgatctcaaggctgggtgtatcattgttgagggtgatagcctatggatgaccaaaacctttaactggatggcttgatttccttaaagtatgtggtgtgaagaattttctttttcagcatacctctaaaaagactatatccatactgcatcctggaagagagatggaagactgtgaagctgtgtggggaaacacacagtatcctgaggcaagcatgcatcatctctgcagggattagacaaatcagcagcagtgatacccagtggttagagaaaattattattgaaatccaagcaagaatagcttcaattaagtggagtaattgactacttgatggcatgctcaaaaacagggagctattccattgacgctctttccctactttatcaattaccaaagttcaaacatgtatcttctgtgtttccttaatttttctgtaaacagtgatattcaatattcttataaggggaatctatattacttttactttgacacctaaaagatcagctgtcagagggctgagaataagaggaatgatcaagtgtgattggattaggaaagagagcccaactcaattacagcttctccccatgactggactctagcaaccacagagcaacaatgcacagtaacagtaacaaagtggcctcacagaggtgagaaaggatgtgcctgcccttcctcttctcattcatgtgcctagcatgttcagtgcttacccttatgtctgaatccaaagagaaaatcagttctaaatgttctaaggaagacaatctgcagatagaattcgcaatatgcccgtggttgagacacactaaagcatcttttcctggggagaatgtaggcctaagggtcctgctcaagcagcagccacagatagagacacagagtcctgaatacacccctaaagaagccaggtgaatctctcccaggcaagattccatagtttccagacagatgtcaatggctgtctagataccctagttcagtgctttcctccctgttgaaatataggttttcttgagagagctaacaccaaagtgacttaggggcgagaaattgattgtccaacaggagaacaagatttgagagcagaggttcaaaatgagagaaaagagagcttgaaaatgaagactcatgccttcaggagaaaacctctctggaacaaaagagaagggtctgaggtggagtttgctcatgtcagcattccatgtagatgagcaaagcttgaaagcatttccctagattttttttcaaggtagttattcatactgcaatggttactacctggcttttagtatgggcagtatgataatgggggacattcaaatccagcaaaatcaaggaccatgggaaagtagcagttctttgtagagtcagagtgaagacccaggtctgtttcctcctgtgtaaaatgacatttccttgactgcttctttatgagatgaagtgaggtgaaatacgcagacaacagggagccaaggttgcagctctccaaagcttcaggtggactaatgtgggttgtacctctggaggggtcaaggctttgtggaggagatttctgtcagtaattggcatataatatgttcttggtaaatgttagttttctcccttgtctttagaaagcctttagtttctctatttaatccagattttgaagcagtaatttgtcttctctctttgataaaataaaaatatgtctgaacctatctttatctgaagaaagttcttatgggttcagtgtgcgcttattaccccctaccccaattaaagcacgtggagtccatattattctctgtctgcactctgacaatgtgtttgacactctttaattaattagttcccttctagatcctgcatgctgggacctgctggccaactttggcatgctacccaagtcagtgccccttgggtgctgcatgcatgttttgtgactggtgtaacctgtcagcactttcctttcaggggctttatctccccctttcaagtctgttttcttctatgacagaatctggcagaatctcattctttttcaacagaattccaaagagcatactaactatccagttgcttttctgattactcctagaataaaagcagactaatcccacattgaaaaccatgctatacaatgactgttgacatcagaacagcaaacattggcaaagctattacaagaatgtcagactgtgggtagtattttatctttgcctaagggagtctttaaaagatgttaagagagagtatacttaggagagtgcatcagcagacattgggtttaaagaaaatgctatttatcctaccaatcacacaatgggtatgaaattctttctaaattcttctcatagcttagctgtctgtgctgccacactggacagtatcaacacagtgtgtagatgaaaaaaggggaaagtctgcaacctgggagtgatggctcactccagtacttccaggactggaaagcatgagccaggaagatcactgtgagttcaagacctctctgggctacttagtaagctacagaccagtctgaactaaagagggaggctctttctcaacacacaaaatccagggaggggaaaaagaactctctgactcatcccatctttatgtactcctcatcattcaagattagctcaaaacaaacttgctttgtgatgttttaattctttataggtattatatcactctacaccacacaattctttgtgttttttgtgtttatctgcaatttgcttttcttttttaaaatgatcttctaaagtacttattagcatgccaatgtctcccatattacaaatgttccagactatacattttttgatatcaatatttctggcacttagaatccctgatgtaagataggagcttgatgaatgatggaagaatggatggatgaatgcaaggttagttaagttctggacacatgctgtactctgtttgtactctcctgtcggcacaaaagaaatggcatattctggtcagtcacgataaggaccaacctattgtatttgggctggttcttgtgaacctgggggagaagttataaagctttcctgggcctatgatagggtagattttcttttctatagcatatacatggatatggacctctaagcaaacagaactagatcttcctgtaggaaaaataattttatagctaggagcaagtgccacccatactcttcactacacaggtaaggaattgagtcctaggaaggtggtgtgcaatattgatttcatgtaatcatgtaatggcagatcagagactagagctcatacaacaagactagaacagggcttttctagggaggacatcattgtagcctgtatgggctgctgtgatacaatactgagtgatgggtaaacaacaggatttagatctcacagttatggacactaagaagtcagagttaaaagaatgagggctttgaagtttgacaaatgcttacttaatggtccatagacagaaaattctggctgtgtcttcctgtgctagaaagagatagcaagtggtttcatgtaatcacctcctaagggccctatacctcaatattttcacattgggggttaagtttcaacatataaatttggatataaattaaacataaaatccacagcaattatggtgagtttgctgtgtgcatgtgtgtgcacgggcaagtgtatgcatatctgagtgtcatcgttcatattaattaggattttattgcatgatcaaaaacagtaagaacccaaagacaatctgtaacacacatacttattgggaaaaatgggcttatttcaacttaatgttccatggcatactccatcaacaaggaaaatcagggcaggaactcagtcatggcaggaacatggtgaaaggagatgatgtagagaccatggatgggtactgcttactggtttgttctccatggcttgctcatcctgctttcataggagggcaccacacaaagagttgggctctcctacatgaatcaccaatcaagaaaatgtatcacaggctcatctggcgggacatttttcttaattgtggtttcttcttccaaatgactatagattgtgtcaagttgaaataaagctagccagtacatggctgacacactatgcttttcctggacattcttccaactgaagcctatgtccattaaataaccctctaccctttcctccaaatccatggtaatcaccaatataactttatttttatgaatttctactctttaagaatcttagagtgccatcacacagtatctgtccttttgaatttggcttattccacttcacataatgtcttcaaggttgattcatatgctagcatgtgtccaaatacatttctttttgaagctgaaaaacatctaactatatgtataatatatccaataaagactatctcttcacaagctaatgacaagttgggatgtttccacactttggctattgtaaaatattgtgatgaacatcagtgtaaaatagctatttgtgtctctgctttgagttatttttgtgtatataaccatagattgatattggagaaaagttcttttattacatgcctcaagccttaggcagtatttaattccttgcatcttaaacattaaacatatgaaacttactgaatcagcatcctggtgaattccattctctgtgctccatatcagctctgttccaggtgcttggttcacacctgtataagatgcagtaccagagcagaggagaaatttctggtgaccaaacacaacacatgagatggaataaacttaactgcacaatacactcataggaagaaaggaaagaataactaaatggtggtgagtttaatggggtatcaatagaagttcatcattaatgtcttcacagtcacagagatgccttttaggaaagaaataagaagtcaccagcacaatgtgttgagaaaatcgtgttcaagcataagagaagggaaaaggctatggtgtatagtttaatttgcctcgagcagaaattgtgggcaaacatcagaaaataagtctggagaactaaggcaagctataaaaggtcttacatctaggctgaagaccttgagttttatactttactcttgaggcaaaatgagctagtgcaggatttgtagcaggaacacagcatgatgaactcggttctttacacagatccctctctggactgcatgtaggatgatctgacagggaatgatggttagttgagtgtaggactattaatctttgcaacaatcagagtcacagagaatgaagagtgaagcagtgtgtaagagatgacagagaaccctaataaccaggatttggtgactgtgttactgattgtgggagagaaaatagtcagaggtgattccaaggttattggctagataagtagtctatcactagatctattccctgggatgagagaattaggaggaagtggaggttgaggaataagaacgatgaatgtatttgagcatattgactacagggtcccttctaaaagagaaatttagcaagaattaaaagttaaagacataaaatctgggctgaaacttggttgactttatgagaaattaactattctagtcattttgtagaacaaaataagtatttatgcaatgaatttcatattggcaacaccattagaaaaggtgaagaattaggacctaagtgaatttttagaaatggtatctataagatacaaaagttataaaaataatgtgccagaaagccaaaatgtcagtcataatcaggaggctcaattgaacaaagcagagaacacttccaccattgcatatacatattattttagtttcattcccaagtcttatatgataaaaaaataccctgacaaatggattttaaggaagaaagtgtttctttgggttacaagccactatcatggagaaatcaaggaagcaggaacttgaagaagctgctcatattcattcatagtcaaaagcagaaagcaatgaatcaatgcacacattgtagtccttagctaccttttctttttatttatctcaggccatgaaatggtgccatccacattcagggtgggccttcacaactaaatacccaatttaaaaaatcactcacaggcatgtctacaggccagcataatctagacaattccttgttgagattctcatcctagatgagtcaagtacacaatcaaaactagccatcacatgcctctacaccaataatcagaagctaaaactcagatacaataaaactgctgtgaagacgttggtgctcctggtagttcttgccagcagcaaccatcaagtacaccaagcagatggtgttggcatcacttcagcttttcaaatcttatatatctgtattttcttgactgtgatggtggttgtaaaactgtgaatatatgagaagtcattgaattatacattatggtaagtgggtgaatgttttggtatctaagttatatgtcaattggtgaaacttacactacctcctgaattctagctgcaagggagtctgagaataatgtcactttacaatgtgtgtacaaaaagatacagtataaagatattgaagtgaatgttgagtagacaaatttttggtgtttttacagggataagtacattctccaaatgataatattggaaaaagaatgaaaagtcaagtaaatacctgatgctaatattttagaaaatacagaaaaataaagttttaaaatgagacagaaaaatagccaaaatgacaaactatgaagcatggatacaattctgaaagccaaaagtaaaatattaaaatgggaaggtaaaaatgtaattaatgtgtaccacttcctaggtaggtggattggataagtcccttctgtgcatcttgggactccatagtaatactcattatttaacctactttgctgttttctgggaaatcaaccaaggcaattgtaaaaagaattccatttcaaaacatatctcttgtaccagtgttagttatgattattttgaaaataaattattggtttattttctttcctggcagcttgcagggcactttcagatactatgagggattgtctacagagaggaggcctacccatcagctctagctcagtttttctaagtcctgtgtctataggctgtgctgtcttcagcagtaaggacttacctctaacttctgggaggcaaccaaggataacaacatcaatctgtattgtttggggaagtttcttaagccatcctgatgagcaacttgaagggaggtttgccatgcctggcactggggattttgctacatggtctatggcttgcgggtggaagcattatcacctatgtggaataacttcacttaaaatgtatttgtatatatttgtgtgtgcatgtatttatatatatgcatatatgtaaatatatgcatatatatgttgtatgtgtgtataagtataaatatatgctaattctgtgtgaagtatgtatgtgtatatatttaagtatttatgtgtgcacatacatatgttttatagatttgtttttaagaaagccataaaatgtttttctatggcttatcaaatactcttagtgttatttatctctcctctcctgcctcccaagtaaaagcccccatggttttcccctttcccatgtcataatatctgtgtcctatttttgccttctgtagtactccttctctattctccctctccacccccacattcctacttccctagcttctgtagttacttctggttatatattaaaatccaaagagtcctacacagctggaaagactgtgaatcacaaaaaacgatcaatttggcaaaatatccacaatgatacagtattagtacctttatttagggacatccagcagatgtctaattagaactaagacctgctcaatgagagggaattcatgactggtaatataaacccactcaactactctagagaggtcatattccctagaagagaacctactaatatcattttcctaaacatataatttctgtttactaaatacttacctttttacccatggtaaatgtagctcttatccctcatcaaaaaagttttttacaacagatagaggctatgaatgagacccacaactgtcaaaacagaataagtgactatggggtaccatgccttaaccaatacatctacaatgtgacttctacaactaagggtcatagcatatctcagaagagggagtggaaagattgcaagggccagaagatcaatatacctgcagcttgatagcatcttctagacatgatggggatggtgtgcatatgaattctcaacaatatggctgaacaagatctgcataatgacaacaccagatgacttgttaatgtcggtggggggaaacttcccaaggccctatccctagatgaaaagctatgaagaatcaatggatgatgggaaagagaaagtcaggtacttttttcccccatgcatgagctccctgataggttatctaatactaaacagtcagctcaaaacacatgcatatgcaagaaacttgaaatggactcaatagggtgtgtgtgtgtgtgtgtgtgtgtgtgtgtgtgtgtgtgcgcgcgcgcgcgcgcgcgtgcgtgcgtgcgtgtgtgtgtgtgtgtgtgtgtgtgtgtgtgtgtgtgtgtgtgtatgaaaacacataaatgtaacaataattatagaaggagtcttctcggaatagaggggcatggcatgagttgaattggaaaaagggatgaaattatgcaaatacagtactcacagatgacattctcaaaaatatttttaattacaaacaagatcatttagcttctacaaccaatttgtaccttagagttaggatattttctaaagagcctacttgaataaaaattatctcagaattttttaccatactaatttaactatttgattttaatagaaataaagaataatttctcatacagaacaatatgtcatccacttgtatgcatgtagacagttctgagaatcaatcagcaatataataatctccttcccatagcgttcctgtatggacatggacaggcaaaggatacaggttcctcaatccggcagacacgtggaactcactcccattcttacactcatcccccctcaggtctcatcaggctccctcctgccatctcatttactaactctcaaacacagaccgcctgtgcttaggagtgggattccaatcatccctcttctcaggcactcggctacatttgtaacacaccagctgtttctgagaacacattcttaatataggaacagcaagacattctgctgtcactgtcctaggccatgccagagctctgtcacagcagtagatcatattaaagaacaaaatcaaagctgggccttcagagaacttgctcaggatctgagtgtcccgccccatcttggtttgtcctcatcgtgagatgcaggcttgggggtgctttggaggacaggattagataagatgtcagccagtcacaattcccaaacagtccatgtagtgggaaagaatgagtgcagagtcatagctgactcaacacagttttcaggcattctgtacactgtggctatcgtgtactgccatttcaaagacctctgcaatgaaaagcaaagtggattctttggcctggaactagagattgctccctctccttagtgaggatgcaacattcatcattacaaggattgtttgacatttgttgacttgttacttggaaaaatgtggtggttaatagtctggacttggagccaggctgtcttagatgactggcttcctggagctgcatcttcctagctatggaaagttaaaacaagctcgatgccctctcagtcccaaatgttcttttctttctaaaagaaaaaaaaaacatgtaaagtgctgagcacaatgtttgggccttaataaatgtaaatgtaagtctttattattcactattgcaattctgccttaagaatctgcaatattttagaccattttaagtgtttactcatagaatgtatgaaaagaagagctattcccctcaatattagtaatgctctggactgaattgaattgagacaaaagcacatataatcatactttggggctactttatattgcaatttaaatcatatttacttttatggaatgtgggctttgtgttagtgtttgccaactggcatgtccttcttgggtctttctccaaatgagtgatcctgtctgccttctttggcaaggttcttcaacaaagttaagctttggtgacatgaaatgaagagttgactggcaacaaaacatagagatggtgtctgtggaagtgctggtgtttattaaaaagcaaaattcttgacctgtcttaagcaaagctcctgatttacctttgcttttaaatgacttcccacctccacccccactgtatgaggtacaggctataacaaacattttgttaaggttgttttcctaatatgcttaaatattaagcagatgcccctgttagttaacctgaactaaaattaaaaattctcttttggttaaacacgtatcaggatgtgaatgaagttcagcttttggtcatttgctccactctgctaaaacttaaaaactgaggaaaatagagactatacatcacagaggcctcatctttaaatatttccaatcttcagttcaacacacacatacacgtacacatacgcgcatgcgcgcgcgcacgcgcgcgcgcgtgcacacacacacacacacacacacacacaccatccgcaatgcgttccctctttgaacctgggccagcccacttttaatagatgggtctggaaatttggaataagcttgtgtggacttcagaagaccaggttccatagcactcaaaacactgggtcccctctgaaaataaatccaaattcaggtccctctcacagaaacaaataaccaagtaagagtgtctccttatgctacaaagactccacggggactccagatacaattgctgcttagttctagatctcaagagaatttcaaagaaagaatatgtaataattacaattgataatccgagatgctcagctcaacccctaatacattgacatccaccccctggaagaagtgtaaagactccccctgtcctgtttcccatactctaacacaatgctgtatcatttacaaagcttctctatgattttcacattgccattcacacaaatttcttgtttatctacttgctgtgcagactatttattgtctttccttcctagaatgaaagcacaaagcagggaccttttcatcttatttgccacctgccaccatcactatccccagaatctatgatggagcctaacacattgtaggcagacaatgaatattttcaactgaatgaatatgtatttgccaacttacccaactaacctcaggggatttgtttatgacctaatgcagcttaagagtagaaaagaattgaaaattttgtatttaagtacatttttaatacagcattaaaatctgtgccctggaaggctataacatgcaactaatttcctaaaaattaaaaatatgctctgtaatcttgatgtctaaaatccagaggccacatagagatgtgctaattgaggatgtgcaaaaaacaccaaatgctaaaaaatataaacccccaaatcttgtttcttattcaagtcagttccaatgctaggctggaagtttcctgttgtaagtagagaaggacacagaagtgattccatgtgctgcccttcagggaccaggctcattacactctatggccttcagtgcctgcttctactctatccatgagtggaagaagatgggtgagtatttatcaggactccatgagactagacccagatggctgctcacaagccactgcaggggaagctggtttctgaaagacacaggaaacacagggcttgctagtgcactatgatgctacagcatttctgttgcttaccatgacatttggtcgttgggactccttgaggtaaaatttccctttgaagtcttcaagcttttcgttggtctatcaagagctctgcttaaaataaatcgagctaaaattgaaatgccattgactgcacttccttcatcatattggatcacatattatgataagtctggtaccacttaggaacatattccccaagtctgtaactgtgaacagccctaaaacattggcattgagttggagcagagtgaattattatttttttattttaaacaaatttattgtcatcctgaagatattaccagaacttatcagactctaaaaatcactcctgcttgtggagggatcgatccgcagtcagcaaggccaaggttttctttattcagatataccagccaagcgcaagccaaaggcagccaggccagagagaggagaagggagaatagggtctccacgtgtgcctggtcccttaagaaccgttcccgagtcaccttagactccccgtcaccatacccttacgggcatgtcctgggggcacacctgtccgggctactaggaggcggggctacagtgtctccctacaattccccttttagtctaaaagaggattaaaacttaatagtgtaaaacatccaaaattaacaatcataaaggtgaaatacaagaagataaaataatctgctattgcacatcctaactatgtctattccagctaagccctagagtcatgtggaaagggtgtcctgctaaggcaggatgaatattacagtacagaccattgcattctctcaggctttttccattatcacggggctttaaggctgctgcctcctaaggtaaacaaatgttcattgttaacaaaccaaccccacctaactgtatgggtgagtgtgaagtccagcaacctgagcatgcctttactcccctcacccacactctgactgccctgagcagcttctgatgcaagccaatattgcccctgcagccctttagaccactcgcaatgcaagacgagggcatggaagcaaatcagtgtctcagtgctttgaccaccttcggggaagtaagaacagcccagacatgtcaggaatagcgaagtaaactcagacttgaattgggagaacaagagcagagcactgtggggaagaacaaggaagccttggatccccgacttccaagagcccatgctggaggcaagctgtatgaacccagctccatttcaaatgctcaccagcttccatttcagaaggtgattgttgttgtggtttttgtacccctaggtggattctgggctgagtggcattaccagaccctcagggaagctgaatttttacaggaaaatgatcaaaatcggtaccttggatgcagggggctcagtgctaccttcccatcctgagcatcccctttaagactcaacttaaggccgactctgcccttcatggcaaagatgcacaagaattcaagtgaaagtggccgcgaaaagaggtgaacaagaggagaaagctgtgcatatggtcagcgacttcaccgtaccccagcaaggctggctaatgtttacactcccatagtttgtatgcctcgcctgaactctgacttgcctgtggtctgggccatagttgctagacttctgtcaccagagatgcccataaaccacacacgatattactaccacccctcccaatctctaagaaccccagagtgtcatgtgcccatgtatgggtaggggagcactccaggatatgtgcagcttcccgtgtttgctgtgtgctgcagtacagacagtctgcagttattggggtagccaagctccacagcccctgactctctttgctcctccaggagacagtaatacattacaggtgttataactttccctcagaatcagactgcctggggaactgtaaatctaaatcatggctgccctcaggaaacctgtgggcctgtaaacacagagaaatgagtgagatgaaagcatccgagggagaaaatgaatttcaggcatcccactgtagtctatttcatttttacagtctggtcacccccctgtggcaggggcagcgccttggagggacaggctgtctcctgactgacagccgacaagtgaagctcttcctagaagcctcagctctcagacctcactgagagacacgagttgcagtgtattttaactctctctagccacctacaccaaagaaacccgaataggtttttactgggaggttggacctgcccaaacaggcattgataatgaaggctgttcttcaaggcaaagggagagcggaacattcaggcatacaaagtatgagagggagcagaggtagaagagaaatggagaaagagagggggaaggaatataaagggaagagaagtagggaaagagaaaggatagcaatggtgctattcctgctattctgaggattcacagtggtgctattcctgctattctgaggattcacagccttggtgtgaatctcaggcccctgtcaagtcatggctgccagtcagagcaagatagcctagcaacgtgagcacctcaacctggacccagacaggcacatgacaagagccgggtagtcattaaaataatcatcaaaggttgtttaatgtgacaatctgaatgtcccaacagccaaaccaaattccttcagccgtaaatgggaatgtgtgaaagctgtcaccaagagaatgatgtcattttcttctgaggaagacattggagctaacttcactctgatttttgccactgcttttttttttaacataaatatactcaaattgctgttcgtagcacagactattattggttcattgactacatggctaactctagtcaatatgaaagagatttggtcagtgtcgaactctcctccccatggatgatttgccaaatgcttttaatcatgaccccagagttacttctgctcccacgaatctacagtggaatctgaaagcaattttcaattttgtagttcatccccccacccttgaaacccacattttacagtctgtcaatgacagcaaaactgcaaaggtctgttatttttttaatcacctagactagcttgtagtgtaaataatatttgaaagcattggaaattatggcttcatattttagcttccagattgctgctgtggaggtgagagagtgtaaaggataggaatgtagacttgggagccagactgtcttggatccaagctctactttctcccttacttgatgtgcaatctttggcaagtatcttaacatctctgttcttcagttttctcttctatcaagggccataacaataatagaaacattctcagctgtcaaaaacacatgaaatatgtaaaagggcctggaatttagcagacaatgaatgctaccattcatatcactagtgatatttctgaaaagttttacatttctattgactaattctaaggtatctaattattatatatgatcttcatctaagcaactttttttctgcttaaccattgtgctaggaaataggtgcacgtgtgtctcagccttacatatgctatccagtgttattttaatcagatatgttcctctcctacagcctactgggagaaaactccctcttcctgaatgcaaggggcattcctggggaccctcctccctagcccatccccatgccagtgcacaaagcttccatggctgcctccttcctctgtcatatgtctgcacattcctggaatggagcatccactagattccagtgtggctgactctcaaacaatggagtggagaggacactcttgtgatgaacctttcagaccttctgtcaaggagcacgaaggaggaagagacccacggaaggcacccagaatcatatggaaagatacaatgacaggagaccagattccttaagaatcccacagaacacaaggactagacaccaaggtcataatagctgccttctagatgactgttgtctttgtatctccacctccataaacccaacgtcttttgtcataacattcaacgaacacatttaaaaccatttagttttctcactattagctgcaggaacattgcccccactacctaggtgatactattcagagacaagcatgagtaacttttcatcataagaacttgggggttcaaataagtgtgtgactccagaccatgttctgttcaccagccctctaagttcatgttaatttcatccaatatggatcataacagagattagagagcatgcaaaagttgactttcaacacagggaaatcaaaacttttgtttttttttttttttttcatctcctgagaccatttgatcagtagatttttaaattcaagttgtttttccagtttctcctactatctatacacatgcagcttctaaagcaaaatagcatttatgatgagaaggaaagcctataataatgagggttcacagtatggaacacttacaacgagcgcatgctctgttctagggtttcctgtgaactagccttgttaatcctcaggcattctttttttttccagtgagtagatcaaaacataatagaaatagccataatttgtccctataatcatgattgcatcgcatgccatgtactttcaaataccctacataccaacagagcagtagaaggcttcctcaattgttaatgcgcattgcagactggataatttctgacaaaaggagggcttcacaatgagctgtaagaaaaagacagctctgcagacatcacaaagctgtcacctccaactctacctgactgcgagttattttctacttattctacaagtcaaagcatgggaaatgtaaaataaatgccccaaaccatcctggtctccctctcctttgtctgcaggaacttatacaaatgctggttcatgttcaaatgaatgagcagatttgtcattgggacagaggccaaaacacttggtgtctgtacagtgttcttctgtctccccgcttctctcttgccatttgttttcttctcctctgcctttctccttgcctcattcttggttccatgaaacaaaattctccttatatgtccaatgagaaagtacatacaagggagggctttggaagaccatgattcatccacatggagaggaagaatgaggggtaggggtggaccgtcacatacgttcagatgagtgtctggaactcaagtcagaatcagacaagctctggtccagagaaggctgttttccttccaaacccagtttctgctctactctgagatgcaacagccatcagtccatgatatctcagaaagtatgtgcccagcacagcttgtaattacagaatgcaaacagccagagttacatcttctcaaggtaagacttcagctcagaggcagtatgaattttcactgagaagggaatttgcagagcaatactgaaaaggaaccacagggagttcccatgactgtctgtcttattttaaattactcttttgtggagagaagtttagatttaaaggttggcagattttcatagtgcagttcaaagccatggtcctggacacttgacttaatactgtaccctcacatggagtcatccacagttccttctagaatgtgtttcttttttttccttttttatttttaattactcatatttacacatccatccccccattccctcaccctcccatcctcccatgttctctacccaacccaccctgaaccacccctaactcctcctcagggatagtgaagccctccaccaaggaccttcaaagtctgccatatggtttgggggagggtctaggccctccttgctgtgtctgggctacaatagtatccctccatagggaatgggttcccaaagtccatttgtgctctagggataaagactggctcctctgttagaggacccatagactgtcttggactcctagctggtacccacattcagagggcttggtttggtccaatgcagctttataactaggatcttcattctatcagtaggtcaggtccactgtttctgcaggttcctccattcccatcttggctcttttgttcaaccctcctccctctccacaactaaattccaatagtatggttcagtgcttagctgtgggtgtttgtttctgcttcaaacagcaactggatgaggactccccttcctctccctgcccccaggctccaatttggtcaggggttcttgtccccatttgcttctttggaggactatgcaatcttctcttggggtcctccttgtttcctagctcctctggcagtgtggattgtaggctagtgatcctttgctctatgtctaaaaatcaaaagtgagtgagtacataccatggttatctttttgtgattggattacatcactgaggatggtttcttccagttccatccatttgcctgagaatttcaagattccattgttttgttttgttttgttttgttttgttttctctgctgagtagtactccattgtgtaaatataccacattttctctatccattcttcagttgagggacatctaggttgtttctaggttctggttattacatacaaatgatgctgctatgaacatagttgaacatacatccttattgtaagagtgtgcattacttgggtatgtgcccaagagaggaattgctggatcttgaggtagactgatccccattttcctgaaaaaccgccatactgctttctaaagtggttgtacaagtttgtactcccaccagcattggaggagagttccactttctccacatcctttccagcatagattatcattggtgttattgattttagcaaaggacacagtcatcaagacaaaatggcagcccacagaatgggaaaagatattcaccaaccccacatctgacagagggctgatcaccaaaatatacaatgaactcaagaagctagccacccaaacaccaaccaacgcaattaaaatatggagtgcagaactaaatagagaattctcaacagatgaatccaaaatggctgaaagacacttgagaaagtgctcaacatctttagccatgagggaaatgcaactcaaaaccacactgagataccatcttactcctgttagaatgtgtttcaacacaaggagagctagggtacatggaggtaagtgggggaagggtaatcgttgctgtgtctttttaaggactgcaaaataactgtaacaaaaagaaagtcaaaatcagaaataatgaaaaagtcatgtactcactgttggaagcttgacttacttactccctggtatgggacctaaagctctctggtccacaacatatttttttctctttgagactcccagtcatcccctcccaggggttgagcacctccagctgtagagcctgcgatcctgacagacaaacttacaggctgttacagtctatcaggtcaaaagcagtatttttttttatttcttattgaaaaaaaagatctttctttcacactattaaagtctgataggaagagtatgtttttaaaatctgtctctctctaccttcagagaattccagacactaatggctttgaagtaattcttgcacactttagaataaatgacatccttaagaaacgtctgactcggtatttacacgtattcatattcccatgcttcctgtctagtttgtcaacgctcaaatacatctttaagaagaatgttttaaaaagagaaaaattacagtgataagaaatgtaaaagtgacatggagaggcctccattttgtcttaacatatgcacacccattgaagctaatggaatttatctttatacaagtggcttttttgttgttgttttttcatggcttaaattgacaaattccctgaaactttaagttttgattcttagcctactgatttcatctcataaatgttgagagttctcctaattagtagtgtgtggcagataatgtttggaatcgatgggatacagggtttcctgggtgctaagacctagggaggtgagtattcctgtatatctttgggaaggtttttagcattttgtatctgacttctcagtcctgattggtagagcccaggcctagacaccagacagtttcagcctccacacattgaaggatcaggcaatcaggagattgagtgtggcttcctttgccttgaaaaaatagcaaggacaaaaagataggggatgtggtgggctcactcatcactgctaccagtctttactttagtctgtttgtctttctctaagccccacacaagcagatgccaggcccatattactgcattacttcctgaagctgttacagacaaccataaaaaagtaggagtcataatacaatagaagtttattctcttatgagttatgggagggttgggttcaaaaccatggtgttcagcagaaatcgtgctacctccaaacagagcaggggtgatgcctcttctagtttttggtggctccaggtattccttagtttttggccatttcattctaacacctttggctccatgatcacatggcctcctcttcttcttttcttctgtccatgatagggatacttgtctatagatttacagcccatttggataatccaagaagagctcatcttaaagatgcttaattatacacgcaaagatgacgtcccagattccaggtgtttgttaggttacactccaggtgttcaccccaccacactgaccctaacctttccagcttcttacatggtgtctgggctggggtagtgacccataagcattcttgaaaggaaaaacaaatgcttcccgtcccctatgcagacagcttccctcctccttggctaccatagcaaagctcaccaccagtctcatggccccaagcaaaacatctattctatctatcaccaaactttaccataagccaggggcagtccatcctccgctctaatctgttaagtctgggaaacaagttagacaacactatggcaatggaagatcccagaattctgtatgtcatagttcatttcaacaagtatagacatgtcaacacattgtatttgtccacctttttagctcccgtgacaaagcagtaacagtaataaaatgaattaaggactttgtcttataggagggagttcatagttttatagaagcattgctaatattacctgggacaagctgtgttatgctttagcataaatctacctgcacacagccagtccaagccctccttcccatagatgaacaaaacaaagcaggaggtggtggaatgacagttctttactttgcttgtgtgtacatatatatgtgtgtggaggccaaaggtcacccttatgtgtcttccttgatcactctccaccttatttttgagacagagtctatcactgagtctggaagtcatcaattcagctaagcaagctggctaatgagctttgtgctctgtctgtctctgcccctccccagctttggtgttacagatgcatactctcctgcctagctttgacatgggtgctggggatccaaactgagggccccatgtttactgggcagacactttattaactaaaccatctcttcagaccctgtaaaatgacttatttattacaattctaagtgttagaaattttcatgcactacattgtgatcatatttttccttccttcaagtctccccagattctccctagtttcctacttaccaaaaccttatgttctctcacaaaagggaaaaccaacaaaacccccaagaaaacaaaacctaaaccaaaaagataaaacccccaaactataacccccaaaagtacacacaaaagcatggggtctatttcaactacttctaagcatgagacctgccctggagtgtagaaagctggttttccctttcctgtcaggtaccaattacaaattgcttcttggttataagtagggttttgtgcccacttcctcttctccgtgctgaaattttgtctaggttgaatttgtacaaatgtctcatgagttgacatgtgaatcaaacctgttatttctggaagatactatactgtttccttggagtcatccaccacctctggcctatacaatctttctgcctcctcttcctcacagctctccaagcctctagtatcaggaatggattacatcttgtgcttctgaccaaaggggccccatatacacctccattacaggacattttcaattctattggtcactttctacaacctaacagtaaaggcccattgctaacatcaccacttactgtggcatctagcatgaataaattgaactgatacccaactagaagtgtcactcctaatgagtagcattcatagtgctggaaggtagcatgtataatataaaactataccataccatactatgccatatttccagaggtgaaaaataaccatcaatgttcctcagctatgaaccatgagaccacaacagtgacctgcttgcaagatataagaaattgaggtaccatgaccatttgataagataatcttaataacaacactggcattttagatgtgtcatcattcacagtcattgtaatttactgcatagtatttaccaacaacagtaataattaccacagcacaagctaacatttaaagagttctcattgtggggttacaacattaagaggtttatgtgtgatatctctttagttttcaaagttgtcctatgaggagaaagttttattttagccatttgcatatgaacaatggcctagtgagccttactttggtgagattgtaagtagcggatctagagatggaatctaagcatgttggactccaagacttttgctttaagtatgataattcagtttgtatactttctgccttttcaatcaccttctctacacagacaacttccctctcaatattaaagaacatctaaacatcttcctttacctatattccaagtagaaggctttttttactactagagaattccaatttcagtggtgatttcaatacacaaagtattttgctgagcattaaagttaaagtttctatctgttgaaacctagaactatacagaagaaatccaagacaagctttggaatccctctgaaatatatgtgggactccaattgttcagcaccaccccacaatcagtcttgggccttttctgctcacccatccatcatttctcctctcatttactctgtgtgctatgaagaaaagaataaaaaaagtccttgtgtatatgaaaagacagccttgcaatgtgactttaatagcattaccttacagatatcaactgtcaatgagacctatgtttcactgcacctttatgaactagagcccagtcaagggcttgacttgaaaggcatagcatcccagggttgagcatatgcactccagatgaaagctgcatgggtttgaatcttggtttgctattaattgtacaaactggagtgagttattcaatcttctctcggcctttgatggttaattttgatggactggattgagataagcctaggaaattaacatctaatataaggaaactcccagagatgattaacaaagaggtagacatagttatagctagagtgtgaactgtccatgtgtctgaacacatggtcccaaattgttggtgctattttgggaaggaccattagcaggtagggcattggcagaggacatgggccaatcttgaggttaggtcacttggactgaccctttccatgcctgactgtccatgtgatgcaacaagccacttcaagtgttttaagccatagctgtgagctcttcccaccattgtgccttctctaccattctgaattgtatccatgaactatgagccagtattcctccatgaagttgtttttcttagatattctgtcatagcaatgagaaaagtaactatcacttaccctagacatggcctttaccatctgggatcccagatggattaagagaggaaaaaaggagaagctggccaggatgagcagtctcacatactcgtgcctttctatcgttggccttctttcttaccactcaccagaaacagtagagccaaatgaccataggctgacctctgtaaccatgagccagaatgaatcctttctccttgtgtctctcatggatttggttacagtaacaaagggcagacaaacaaaacaaaacaaacagaatgcaaccccccctaacacaatgataatactaataattatggaagttattattagtaaaagtgaagtatgtagctaaagcaccaaagaatcctgccagatacagaagatttccaacaaatataagctggtgccattcaattactttgattcttaaagcaaaagagtactatccatgctttcctggtagcaaatagtgtgacagagcctgagtggcttcctaaagccacacaattatgatgggaacaaaggcttatgctattcccactaagtcacctaacttatattatatatcttccttctttgtgcttcagatccattatggctgacctctcctctgggtatcagttaagacaagcgtagagctatgggcacattcatcatcaccatcatcacttattggttaaagtataaatcaaatgtgctgagaaaaaaataactaaactaatttaactagagttaataaaatcatatttcagttgaaattatttaaaaataggctgcatgctttcaattttgccctggattttttggcacatgaagctgccatttcttaaagcagagatggatgttttaaaaatacgagtaggtaaagagtgttacacaacacttctagaagagaacttcatgctaataccatgcgagggcagaggtattaaaagtggaaatcacatagaaattaaagcaataactaaattcaatggttctaattcaaatttctaagattgccctgcagaggatcccagacaccatttcctggctccttactgcaggaaagaaaagtgctgtgaggacatattatgcattttcctaagaggactattttgtattttcctcttcaacgctaaactgctgggcatcatagatcatccactgcaatattagtgcagaggaagatgttttaactttgtatagtattcaaaacaaagcaaagtttttgaacttgaagaatctagccacttacacttgtggggagacagagaatgtcgctatcaggatcatttcatgagatacacaatatctgtcagtgagaggtgtacatgtacccgaatgtatctactgcagagaacagtctgcatcaggcatctttaggcaaaatggccaatagcataaaagaatattgtgctcgatagttctatgtcaacttgacacaagctatagtcatctgagaggagcaaaccttgaacgagaaaatgtgtccataaggtgtgtttgcaggcaggctatagagcattttctgaattcgtgattgatgagggagggcctagtcattggaggtggtgccacctgtgagctggtggtcctgggttctataagatagctggctgagcaagccacaggagcaaaagtaagcaagcagcaccactccatggcttctgtatcagctcctgcttccaggttgctaccctgtttaatttcttgtcctgacttccttcagtgatggactacaataataaaccctttcctccccaagttgcttttggtcatggtgtttcatcagagcaatagaatctaactggaatacacatcttgagatcttggtgcacatttctcaaagttagagttatgttccttcatccatctccttcctgtccttagcagagagcctcagcatgtgcattgctcttcagtgctgaaagggtatctagtagctgcagtcaatagttcaggggacttggatattccatgactccggtttctaggcagtgcatctttttgagtcttaacttgctcatttgtaaaatggatcctgattgtgatgcccatttcacaaaagggttttgatgaggagatgaactaataatagaaatatgtccttgcacattgctttacaagaaaattcttccttttttataatatatttttatatgtgtaagtgtgtgcttgtatgaattcatacatgccaggtgtgtgcaagagcctggaagagggcattggatcccttacaaatagagctacagatagtgaagagctaccacgtgggttctggaaaccaaacccaggtcttctgaaaaagcagcaagtgctcttaaccacccagccatctctctagcctcaaatttgatcatttttattttcaatttggcaatgagatcaattccataattatctattggttgaatagtgtacatttcttcatggcaagaaacattgccgagatgcaaactaaacattggctttgtgcacttaccttcaatacaatggcaaatgtatattttgaatttacaataataacatcaggaagaaactaataaatagttatgtcttataggaagttgcttggcttatactatttttgttttttatttacaaaaccattataagttactggaatgggtgcttagtataatttagataatacgtataaaatagaaataaaaataatttgtgatttcattaccaagatgacctcattaacaatattagttagagtctactatttttctacatatacatctatttgaaaattatacatgataaagtgaaccatgcaatgtacactgtctttgcatacataataatatgttgggcacatctttcagtgataatatatgcatatttgtgatattatttttactatgggcatagttttcctttatgaataagtagggataattatttaccaataacattctttagacatctatttccaatggtttttatcataaagtgaatatagtttgcataatattttcatgcttttataatttgtccttaggataaacacttccatgtgaaattgtgggacaataatttaatatttatatgtatatataaattttataggtatatatatttttaatagtattaagacagattgccaaattaaactataaaatgcatactactttacattctcacttgcctaattttgcttgaggttgctagtttatatttttgtcaacatagtctaacactagaaatactttattgccaggcagggtgacacatgccttaatcccaatacttgggatgcagaatcaagaggatctctgtgagtcctaggcctttctggtctacacagcaagtcacagtccagctaaggctatgtagtgagacccgtccccgctccaagtacttgataaatctgataagtaaatattatttttaaactatcatcttttctctgaagcttcatgacattttaaaatgattgtgtgtgtgtgtgtgtgtgtgtgtgtgtgtgtgtgtgtgtgtgtgtgcttcacctgcatatatgtatatacatctgtgtgtggagtgcctgaggagagcatcaggtctcctagcactggagttatagacagttgtgagttgccatgtgtgtgctgggaactgaacctaggtcttctgcaagaggccttttcacatatctcttcagcttcttccagacaattttattagagattaaaagaaaaactccatggtagtaggcaagctatcaatctcagcagctgccctgaggcaaagagaaggaagagagccatgtcatttgtcatttgagtcaagtcagcatgtactcaaactatcatcatagatagcatttctttggttatcagataaattgttcaatttcctttcataagacatttaaaatgcctaattttcttaatggtgttaatgttttatgttcgttaagaaggatgtatagaaacaagactgacagtctttaaggtagttctcagggagcttgtctcctggaattcacaagcatatgcaggtaccttcccaagtcatgggtagtaactgccattttcttctaaacagcaaaaggcataagatgccagttctaaattgtcacagactatagttcccaggttactggcattctcctactctttcagagtccttcactctagagaagccatgtggtgaacaattctatgcaaggattgtgtcatccaccaactgcaatgaagaaaccagtatagccaagagtcatgtgtatacagcagactcttgtcccaggtggtccatgaagtgactgatgctgcagtagacaagcagactgcagcagtttcatgagggacaagatgcagacatatctgactcacagaatttataagatactagtaacttgccatttgcactaagtgataattagcactaaggtaattcttaatacagtgagatttataacaatacagaatacagaatttcagagagtacacaccttaaaatactgtataaattgtagatatatttcttaatatggacacaaactccccagaaaaataaaagcatctggagaggcaagaaatgacagagtggaaatcagtaagcactaagcaagtatgagagcccattttgcatcctagaagaataggtattggcttttaatagattgatcacagaggcaaagctttggttataaacagtttggtaaatctgatgagaacaccctcattacccatatataatgtagtctaaagtattaaattctcaggaagctatggtggaatatttgtgtaatgatgcaaagattgtcatattctttatgttgtatttctttaactctttgaagctctgttactctgactgcctaaaacatgattggtctaataaaaagctgaatggccaatagtgaggcaggtgataggataaccagggatgccaggcagagagaataaataggaggagaattctagaagagagagagaaggattaagaaaaggagaggaggatgccaggggccaaccacccagacacagagccagctacggagtaagaaggaaagaaagacatatagagtaaagaaaggtaggaatcccagaagcaaaatgtagaagagaaacaggataatttaagttagaaaagctggctagaaacaagccaaattgaaaatgggcattaatagtaagaataaatctccatgtatttatttgggagtgtgcttccaaagagtgaaaaaaagcaactacagtaagtgacttgagaaaaatctgaaatacaggaaataccaatggccaccaaaatctataaccacaatagctactttttcctgatcactcttcaaagtacatcacagaagtaaacacaagtcttttatcaaggaaatacttgatgcacattcctaaaacacttccattaaaccacagataaagtaacaagaactaaaaccacactgcacataggagaaaacaaaccatcatgataaaagtcaagagaaaaaaaaaacagggcatatcgccatctatgtaaaagcaacaactaacacataaagggaatactgaatagaaagtgccagatttaatattttatgcctacagaaataaaagatcctgttgagtgtgtgatgagaactagactatcaaaaagaaccaggtacatttgaaaagaaaccaggtagaacttatagaattgtgaaatttagtgatttccattgaaatgtcaaagagcaaaacaatgattatatgtaactgaagagggaatatggaaaagagacctgatgataaattacagaggatggagcatacagaaacatagttaaaatatggatgagaaattaaacagaatagaggagggtgttcaaaagaccttcaaataaactgggtttccagggagagataacagagagactggggagaaatactagatgaaggaataggtgagaattttctaccaataatgaaataggaagaccgataaatatgaagcccaaaagatacctttagacatcaagataagccatgacactaaggaaaatttgagaatgctatgaaaagtcagacttaaaacaccaactggaaacaaatacaatctgccttcaaactgtacttttgttgttacttattttgttttatgaaaagtcaaacaagacaaaatacgtagcaacaaaagtacaatttgatgacagattatatttgtttcctattggtattgtaatatggtaccacaaaacccaaacttttatttttttaaagctctcaaggccataagttttaagtggctctcacagtgctaatgtcagggtgtcaacaggaatgcttctttcttaagatcccagaaaaaaaaaaaacatgttcttgcaagatgaccctcatctctgctgcctctctctggcatccactgtcatattccttctcaccgatcttgctcctcctgtctatctctacaagactcactgttgtggctcctgggcaaaagcaaatactccatgatgagttctgcatttcttcataactttcaacttcttagatcatgtgaggtagcacactcaccgtgaccaaggattagaatgtggaaccttggggagctatttaaaggcaaggaccatagcaatcatattaacaattattgaaatctggactctgtatctagcaacatcaccttttaagaaattatatgaaacaacaatcattaaagcaatcaaagtagcgtttgctctgaaaatcactaaaggaactctgaaaggatgaaatccagaggaagaaaagaatggtctcaaagttgaggtatgaataccaaaaggtccagaaataaaccattaataagaacatgggttcaaacaaatattggctggataaaacaatacataaacacaagaaagaagtagaaaatgtcttcaaatgaaaccaaagaaaagaacgtatacctatgtgtgcgaaattcaacaggaacaaagcccagagggaaatttgtagccacaagccctagaactgaagaagaaagatttgaaatcagcaaccaactttacacccaaagaaatgagaaaaataagaatagagttcaaatgcaacaaggatagaatgatgacaaatgatggaagaacaacactgtaatttttaaagcctttgttcttcaaaacgttgaagaatactgacaagacattagttagattgactaggaataaaagacagatgacttatgtcttttaaaaaggagcaaaatggcagatattgttgggagtttcactgtgacaagaacattaggaggatactctaaaactatatgccaatatactggactacctaaatgaaacagttcatctcctatgaatgcgttctacccagactgcatcaagaggagacagcacatttgaacatacaaaaacataaaactagtctggagattgaatgaataatcaaaaccctctcaatagataagattctgggatgatggcttgactggtgaatattaccaagcatttaaggaataatcctattaaaaattttccaaatagctgaagaacatttccaaattcataccctgaggccagtgtcacaacacactcatcccaaagccaaacaaaggtcatgtaagaaaaggaaaagactaatcatattaatgcagcacaccttaatatactatcaactcaaattaaaagactccatagtatgcctgtgacagttaatactgactaacaacttgacaggatctatcaccttggagacaagcctctaggcatgactgtgagggattatttagattggattaacctctggccatacttgtgagaaattatctttttaaaatattcagtttaatattcatatatgcatataatatgtttcaataccacttcctcattcccgctcctccaatttccctctcccctcctcaccattttcccatgctaacccaagtgtttccctttctcttggcgataataattaaggttggaaacctcaccctaaaagaggggagccttattctttgggcttcagtactggactgaattaaaaatgaactagttgtgcacaagaattcatctagttcttggctgcaaatgcattatgatttgttccctcatctctgttgccatgaattcactaccaaggtagactggactcttaaaatgcaagccaaagtaaagcctctttctcaaaattactttgtcatgatattctaccatagcaacagaaaaggaaactaatacaatgcccaagtagaatatctttctttatcacatcaactctatcctatgagcacaataaatgtaacatgtcacattcatagaacttataaataaaatacactacccatgatcatcttagtacagaaaaagcatgtgatatgtctaagctctactatgataaaataagagtattcaagaaggaaaggaattcaaggcgtgtatcttaatataagaaatgttttatcagaaaatcccatagagaatatcatccttgaggtgaaaaaatttaaatttcctttaatattagaaacaagaacaggacatttgttttaccacttctatatggacccaatcatttgggcaatgaaaagaagcaaaggtctccagactggaaaggaaaggcaaaatcatttatttgaaggtagcttgaccttatatataaagaaaatcctcaaaacacacacatacaacacacaaacacaacacacatacacacacacaaagagaattaaaattaacaaataaatttagaagatttgtaggatgcatagctaatgcacaaaatccagttgcatttctgattatgaacaatgaacaatagaaaaaaaatcaagaaaacaattccacttaaaaaaacatcaaacataataaagcacttaggactaatgttagctaatgagacaaagcctgaagaaaatttgttcaataaaactataaaatatgactgaatcaaatcatagaagacacaaataaatgaaaagacacccaatatacatgaagtaaacactgtactaagttaccatgctattccccaaaacctgcagattcaatccaatgcccaccaaagcctggtgaagttttcacagaaatagaaaaaattcctaaaattgttgtagaaaatatccagggactaccaatattcaaacaatcataagattttttcatatgccctgatctcaaactggtcacaaagttactataatcaaaacagtgtggcattggagtgaaaccagacatgcagaggcatggcattggataaaggcatgcaaaataaaacaaaaaaactctgatacatatattcagatcatgtttgacaagggtcctaagatcatccaatgggaaatgattattcccccaaagaatctttctgggtaaacaggaaattcatgtgacaaagaatgaagcagggcccttcactttcaccattaaccaaattaatgctatggacaacaagaagccaagaggcatgatactctaagaagaaaatacagaagatttggcagcaatttctcaactatgacacttgagacacacatgaaaagaaaataagaacaaattgaatttcagaaagttttaaaatttgtacatcaatatcaacaaaattaaaaggccaaccacaggatgagagaagagattttcaaatcatacatttcataggaaggtaatggcagaatactctgagattgtgtgtgtggaacatagcacccagttagaaaggggaaggtcgggagcacacattttttcaaaggagagaaagagtctctccttgtctgtagatggaggcctgcagtgatcttctacatacacacttagaggaaagtttattgtcattctgcagtttcccactgctaactgaaattgtagacagcaaaactgtagctcaggttaaagcctcaaagagtaacatgaaaaaggattatacaatgccaatcattggacaattcttcaccaatcaggacactggtgtcttgcatctgttaggatggctactaccaaaattgaagttgctgatcagaagatgacaagtcttgacaaggatttggtgggagaaactagaatccttgctactgggaaggtagaggaaacagcagagtatcattcatccttgaaaagcaaagggaggggtctgcagccatacctccctgaatgcacccaatctcatctgaaaagcactgcaatgtggatgaactccatggttcaagacatagaaagtcacaaagatcaacttaaaatcccacaacagtttcagatacctgggatgatatgaaataatgattcaataaattggatgagcaatagtatttcctaaacaaatcctatgaaatgtaaaaagccttgtataaaattaagccccagtttttgacagcactgtatttctgactatactatatttctcccctcttggtaagtaacagtgtgttggtagtggggacctgcaggtttctctgagagacagcaagtctgaacggaggcagacacagtactcgggacactccagtggaatccagagaaggcagagagaaatagtgatgtcttgtggtaactgagtaagtaatcctgtgaaataagcaccttgaggatctgcagaagatggagtcatagatatgggagtcatagatggctaagatcctacattaacaagcagaagaaaagtccagactcaaatgtaatttgtgtgtaaggacaagccagaggctgtcactatcagcacacaagagtcccaaagatccctcctcctaatgcacagaataccagactgcaccctagaggcagaattcaaaagggccaggggtagaactggtagctgtatttctaacacgatcccagggatgctaggctctttactcctcactttcgaactgaacagttagataattagattgttcacagagctattagctgtgggatctagatgtagactttggtcctggagttggcattagcttaacagtaccctaaagactctgtcttctgaagaatgggtatctcttgatctctagattgtagaatcatctcagaagggaaatcatataaggtccaatgtgggttttattacaatttgcaacaagcattagcaatcttcattaccatataagcacacacacacacacacacactcacacacacatgcacacacacaatcaaaagaaaaaaacttacagagtaaaactttatcctttctagccatgaggcattcgaacctgttcttttaaaaccctgcattaaaacccactaacttgtttttatgtcttactgaaaaattacaatgggtagtttaaaactacattaggcgttagctgaagatgttgggcaaagggtgacggtgtgagtactgcttcagggatgcacaggatggtccaggtgggagccgttaattaatccaactgaagagatcaagccaaccccacattagttgaactgacacatgtgagcagccacagaccacctcttcctccatttgccagtctttttctcatagactaatcatgctctaatcagctttatcctttgtgggttttgttttttgttttttgtttttttgtttgtttattcctcagtgctgggactgaactcagccttcctcatgctaggcaaccactctccagaagaattacattcttggccttcattctcacaccaaacatgacttaaaatccaaatatcaacaactatatccaaattcaatgtaagattatgcattaacagaacaaaccagctaaaacgtatttcataccctgccaagctttccaaattaatatagcaggctctaaaataaataccgaacacttattaagcttgcctacatgcgtaaatagcacagtgtgttcatccaaatggaaaaccgaggagggaacgacatatcacctgagcacatgttagagagggtaacacattttcctgaaagtactgaaggtgtgtgggtggagggagccgacaccagcttcagactccacaggcatcttgtagtagaactgaaataagtggtaaagttgccattgtggggaaaatctaattatcagtaaagtcagttttgcttatgaaatgagggggataatatatacataaaagaagatgccaagcaatgtctgaaaacccaaactggcatgtctgcaggaaagtaaactggagcccaactcgatgggttctcttcagccctagtgctgagtgacctaatgatgcctgagcctcatgcaactgtcactgagtttcattgacaacataattgtggtttgcacagcacagggtgccttttagttaaccaattcaatgaagataaaaacacatagagggaggacggccagaacctgaatggccatcccaaaatagcagtgcataaagagaaacatgaaggttgacagtctcttcactgtttctctaccaaagtaagtacactctctagtgcagcagctctcaacctatgggttgtgactcttttgggagtcaagcaacctttccaaaggggtcgcctaaaaccatcggaaaacacagatatttgtatcataactcataactagcaacattatagttattaattagccatgaaaataattttgtggttgtgggtcaccacaacatggggagctgtgttaaagggttgcagcattaggaaagttgagaaccaaccactgatctagtgtgtttatgactgcctcctcctctgagaaacgttgatccacacagcgctgggtcactgaagaaccagactgaaggcagggtggctcttcaaagtagaagcaactctaagggcccaccgtctctgtcacactaatttgactgtcattttcagccatcagtccactgccacatctcctgggccaggttgcttttctggactaggcagaagagaaaaagttgggaaggaacaatttctcacggtggggaacactgattaatctaaaggccagaaactaggaacagagttagaaatgagaatggacagcaggtgtggagtttaaggcacaagatgtgaccatgacaaaccatctctgtcttcacagtgaatgaacctgatttacaacatggggttaaagccacctccagctcagagctggacctgggaatgtcacaatgtgatcacaaaaagggtttggggacacaaggttgaggacagatggaagggaagtgggtagtggtgtcaaggaagagccagcaggcctctgcagtctacctgcctggtgcctgtggttgtcagacaccattcaccagcttggaaacatttcatgtacataccagtcacttgggcatcatggtaaaaggctcattctgcttcaggaggtctgcagtggccttatattatgtttttccatggagctccctgcagatcccaaggacacttgtctgaggaccactcttcaaggaatatgtttctgcatatgtgtcagaacacagatgaggtcctgtattaacaaatgcttgaatgctttccctccagaagccagaaccttagctattgcttatctctgtgtctacagccattgtcacagggttgtgcacatcatgccccctttaatcaaccatcattcaaaaggagacaacactcaaacagatcttagacatattgatctccttaggagagatttgtttaataaacaacaaaggccagatttatagagcagataccatgttgtcacatgccagaaaatggacaagaaatgggaaagaatctactctgaaccatgtcccgtgtatgtatgcttaactcactcatgccaagcataagacaccaggtattcatttaatcatcatacatgccctatctattagttttttaatccctattttatatgagtgaaatcaaatttttcagtaaagttaagttgtagagtttaaaaagtgatgtagaatttttaaattgggaaggtatggctattttggtaataacaatccaaggaaatattattagctctgttttaaaaatatgaacaaatttgctcagaagcacagttaatgggccctaatctagtggtttcaacctttgccacaaacaggaagtgcctaatagtgtaaaaataatccctctccttgagacacatcattgtgttattaaactccaatccctagatatatcaccaggcacattttctaaaagttttctggaagatcttaataggttagacatggcttagaaccacaccttatgtgaggccccaaggaacactacactgtatatgcttaaaaattaacatttcttcatgaccatattcaaggggcagatgaggtaatgaatctctctttgtcactgggcaactgagtattgcatgcctgctatgcctgtaaaatgtagcattgtgtgatattagtgcctatggtcaagtgaacaggctatgttccaagagggtttgtagtaatgggaaaatcctgcccacaggacatggcaactgaattgaattcagaaagaagtaatacaatgtgaaagcaatgacagggaagagtctggtgacccttgttcatttttccatctgtattgcaaaagaacatggcaaattcagttttaagactcagccctctcattgcaatggtattctatgtttctgatcacaccttttccaggagcaaggggcctttgctagcaccaatatgcagggataaagttgtttctctcctagaaattcctcaagatgttaggttaggcatcaactgcaggtttaggattggctgtcttgaactcccaccatgcatgatgtttagaaactgacttcctttaggttgggatgagagcaagagtaagggacccttatctagtacctcctgcaaataataaggatatgtgtggtggaaagaggtgaatagtaaaagcctggccaggagggcaaagctaaagatcaagtcaatttatgaacctaaattgacagactccctgatttaggagagaatggttaactcatgggtgggggggtcactactaatatccataaactggaaatttttaactgttcagaaataatgacagacacactatttataaaataattttcctgtactttaattttccataaattacttcctcacacaattaaatgaactaaataaaccattgatacaatgttacaaacaacataggatgtgtatcaaagacatttcttctttgttctcaatatccaaccattttttttccatcaacccagagctggatttgctggtttgaacagcaacatgatttttttttctcacagagaacaatagactagcttctatctattgtctgtcatagagaagctctctcagactccacatctctctgtccaggtgcattctcttaccaatggcaaaccactgctttgcctcatagacccagattccaaattacctaattttattggaatgttctctcagctactcttttgttttttctcccagtggagaattaagaaaacagtttccataaagtcctgtgcctcttgcctccagatgtattagtcctttaaaataaccaggtttggagggaggcactgcactaaattttgtacgtatcttaaccaattgatttggtttcctacatccggctgtacactcctttgagtcttacgtttcttttttgaaatatgagtttaaaaattattaactacttactacatgctaagtgtggtttgtgtgggctagagatacaagactaaatgggggaacttctctgtcccaatgtagcatacacccagaaggatgaataagcaataaaccaagtgtacgatattatactacatgaccgcattgagagaatacggtaacaggggtttgctattttaaatgggctttaggaatggcatttctgcagtgctgctgattgaacaaagagagtcccaaatgaggaatgaggatggcatttcagtgatatgagctccagcagggggaaagaagggccaagaaccttggggagaagcatggggtacacagaggctggtgtgactggagccagtggctatgggaggacagcagcagcagaaggacttggtgtgatccataaatatggagtgaggatcacactgagtgacctaccacccacttaagactaagacttaaatcttagcccctgggtgtgaagagacatcactcaaagacttggtgcaagggaatgattttgaaattttttaaatagctctggtggttttattaaaggaaggcttttctagttgactacttctcaccagtctgttctggcatgcttctaacaatatcagagtcacctggatcaatgatagccagtgtgcatgtgcggtagtatttcccacatgctgtgccccattcaatgtttttgccgctgtagtgctggacaccggtcttagccaacatggcatagtactcaatttcagatttcctcagagccgggcagttgttggcaagaatgaccaacttggctttgccctgcctgatcatcttgagcgtctgtttgtagctctgcatgtacttcccacttttcatcaccagctggagactggagttgatggactacagagactttttcgtcttcttggcagccactatcttcctgtctcaggtgcagaacagcccccaaccaagagcagctatctaagatggccggggagccagaaaggaaggagcacccacaaggccgagcccttctaccagagcatgccatgattttgaatttaaagtcaagttttagacacattaggctcaggtcaggggagaagttccacgtgttgttcaagaaagaattttttggttcagaggtggtgccgcacctgtaacttacggttgtgggttgttggaagttagagaccttctaagtaaaaggaactgggcagagcacttaaatgcaaggagtggggtaagcaagcctaggacaaagtcctggagctcactgattctcagaagttcggacagcgatggatgtctagtaatgaaaaccaactccatggccttttagtccaggaggataagtttgtgtgttctgaagtagttttcaaattaaatagaaaacattcttactaattatttctaattgtaggtctatagagccaatgtctctaaactactgatttaggaaggagtgctggggatgttggaattctactgttggcagaaaaccctccccaaaacttagatttttgggggaagtgaattgcaaatgtagaggtcaattgttcgatccacacagacagcttgaggctcctgtctaaaccttagttcacagctacatcactctgagagtcctgaatcccactaagtgacaatccactttgagcatttctcactcttccagagtccagtagggagagagggttaagctttattctttggtaagcctggttgaggatgagggagtagcagagaggatgggttagcaagggttatgatctgaatgtgttcctcctaaaactcgtcatctccagtgtagtgttatcagagcccaggctttgaggaaccagttaagtctcagagagtagagtccttgggatatgataggaatgagcttgtttcttctctctgccaaccccccccatggcataagaaaacagaaaacagcttttttccaagtcggcttgcttctttttcctggacttgccagtcttgagccgtttctactgcttaagccactgcattagtcttactacagtagctggaactgactgatacacccggagatggagaaaccatttctgtgtagccagaggcctagcatcagcaaacaaagaaaacatagggcatgggtaaggatggcaaaggcctatctgcctccccctctagaatcttacttgggagccttctttcatgacagagtctcccagtgtgattttaaagattaaagtttcatccaaagagttgggcattttctcttctgcagattccaggtaccacacccagtaaaatgatatcagtctagcagcagacaaatagtggttctcacaatgaactagaataaagcatcctcctcacccaaagcacaccctttgcatagattctgatcttggatcatcaccataggatacacaagttcatctgcctgaagaacgcacctccctctcaagcatggaacacagggaatgggtaagctgcagctgattgactttgaactcacctgtgtatgtgtggtgaaaaactcggaaattgattttgatttccatcaagcagtgtgtcttttttttccctcctcctgaaagtgcagtttaaacagctttattgtcagagtcccatgccacatcctctgattctataatcttcctggtttaatgtgctttgaaatgttcatttagcagatatttagtgaacacctacaaggaaacagataccgagctgggaactggcacggggagaaaacaaagcaggaaaacaccattgagtgtgtggagcatgcattatgcagaagagagagagtgaaaatgtagacggagtttgtcatcatacctagaataagtcatgtaataaaagtaatctaacagaaactcagggaggtcacttgatggtgactggtcagaaatgcacactctgaaagactgacctgtgaacctatggatgagacagaaacacctgtatcaaggacttggagaagagtcctggtgcaaggacaagtgagcagagttagaaagggaagcagactggcatggtcaggtaataggaaaaagcatctatggacagagagagagagagagagagagagagagagagagagagagagagagagagagagagatgatagatgctgcaagaccatttctgacacagaaagatgttcccatttgactttcaagggagacagaaagttgtagcatgaaaaataaaagacccagagactgataattggggttcaaggtgaagattagaaaagcaaagctctagtgatatggtttatgattcattaaagccactggagatcaaaatagcaaagcagtcatactagttagtcataaaggcaggcagtggtgacacacacctttaatcccaggactagagagatataaaagataggagcagggttttcagttgtcagtctcaggcattcattctccagccacattgaggataggaaggcatgatattctccagccacattgaggagaagcagcagtttgagtctcatgaagctcatgaagacaggattagccctttcagcctaaggtagagtaagagctagtgacttgactgttttgattttctgatcttgagcttgaagcttgaacctggatattagtctctgggtttttacttttctgttatacaaagcagccaagccactatctcttacctccaatagctctaaccaggatgcagactgctgcctctcttcagtatggctggagaatgaatgcctgagactgacaattgaagaccctgctcctatcttttataccactcatgctgggattaaaggcatgagctctgttactcttttagactgattcaatctcttgtagccccgggtggccttgaactcagagagatccatctgcctttctttcctgagtcctgagattaaaggtgtgtttctggcttctatggctaaccagtatggctgcttggctattttgatctccagtggctttaataaatcataaacaatatatcaccacagaaagtcaaactttttcaatgaaatggacactttggtgcagcttacattttcccttgaactgttttatgttgaggcaactgtagattcccaggcaactataagaaatgaaacaaagactctattgccttcttacaaaacctccataccaaactactgccagaatattgacatcggcacaacccactgactgtattcagattcacccatctctacttgtatccacatgtttatatcattctatgtggtttttcaaggaagtttttggtttacaagaaaaaatgaacaaaaaaccaagttcccttatgtgcctgtctattgctttcaggcaaacccaacctacccactgttgctggagtttcttgtcccgcctggccccatagctactttgtcccaaataaacacataaagacttatattaagtataaaactgtttggccaatgactgacttcttactggttagctctcttttaattattaccccatttctattaaaaatatgtattgccacaaggctgtggcttacccacaatccggcatgttactccttcagcaacagaatgtctctctgcagcctccctctgtcttcctctccctagccttcccctggtctggtagccctgcctatgcttccttcttggctatcagccaatcagtgttttattcatcaaataataaagaatatatatacagaaggacaacccccatcaacacaccatcatcatggcccaccagagtggtacatttcttcaactgacagagcttactttacatcatattcatttacactccagagttttcctgaactcgtttcaatttgttttattttttgagacttttatacatctacatcatttctactcccccttctcccctccagctccttccatggtcctgccaccctttcaaattcatgaccttgtctttaattatgcacacacacacacacacacacacacacacacacacacacacacacacacattgttgttcatttgtacatgcatcagccacttgtgagtcagccctatcagggacttgtcactggagagaactaattctcctcttagcagctgtaattgtctgtaactcttactctccaagtggggctttgtgagaacttccttattcatttggcatgtcaactgttatagtcactgtgtgggacttgtttaggtatagtatatattttatgaatttttaagatatatgtactcatccttatgaatggtttcactgctctaaaagtcctcttatccagctcacccttttcctagaaaacatcaacatttatggtccccacagttttgtgttttctccgtcccatgtcacagagttgagctatgcagtatttagcattctcatgctggcttcttgctgtaagattcctctatgtatttttgtgactttacagctcatttcctttactgttgaataatattctgacatctggatgcaccatactgtatgtaccaattcactgcctgaggagggcattcttttgttttgaggcagatatgagtaaagtgaatatagctgttttaaacatctaagtgaccttttttgtagggcatgttttcagctccttttgataaatacttttgaccacagttgctggtttccatgtttagaatattctatttttgtcattaaaagtaaaatagaaactacttcacactggttcatgctggcttctagatctagcattttgtacccctaacccatcagcagatgcttgctagctgtcatattatcattgttttgggtttgggtcattataacagtcctgtctagtgataactcattgttgccctaatttgcaattccctaatggcatggtgttgagcatcttttcatatgcttatgtgccatctgtatgtcatctttggtgtgtccatttgagttttagtctcactttaatttagttcttcattttcttattgttgagttttaagagttctttgaaaaattccaagagctatcttttatcaaatatgtagtttgcaaatattttatctcaaattgtggctttaccaaatgtcctctaaacacaggcaaggtactggttaattattatttcttaataattagtgaatatagcctaccctctcttggtccttcctgacctctttctcttacacacactaagctgttcatttcatttaaaaaatgaagaatgttctgtaagtaaaattagagtataatcttaggacactggcttgtttcactcagtatgtaatgctctcagggttcacccacattagtcttgtgtgtgtgtgtgtgtgtgtgtgtgtgtgtgtgtgtctgtgtgtgtgtgtttgtgtgtgtgtgtgttacacgtatatttctttctactgatgagtaatgtactgtaatatggctgaaccatagtttgtagaatgactgtccaccactgaaggacatctgaggtagtttgcatttttagatataccaaataaaactgtgagtatttaagaacatttttcccctatagacctacgttttcatttctctgggatgaatgctcaagtatatttgtcaatatagggtaattacatgttagttttataagaaatttcaaaggtgttttgcaaggaggccacactctttcacatccgtatcagcaatgaatataagatctgatttcttctaattccctctcaatctgcacgttttcactatgttaacttttattcatggtggtacctcaggatgatatctcactgtagctttattttgtgtttccccgatagctaatagtgtcaagtaagtccttctctgtttaacaaccatttgcatatcctgctcagttagtatctgttcctatatttgcccatttttggactggatttttattgacaataatttaggttttaaagttctttatatattttggatatagattacctgatagtagatgagtgatttgtaatatagtttgtggcttatgtttttgtctaacagaaccacttgtataacaaacatgattaattttaataaggttaaaatttagcattttaacgtatcctgtatttggtggaaaatataagaaaaatttatgtactttgccacctctcccttttaaatggcatatttagaacagttacatttagtgcaatgtttcatgtttgagcttaactgtattgctttgttggctacttttaaatttgttacatgcacctgcctttctcttttcttgtctttgtgtgggctattgaataattttcagaattgttattttattagcattttggagtatacctcttgaggtagttttattggtagctatcttacagtttgcatctctaaagggttgcaggtatctaaaatagttttgaaggcataaatattagaggaaaggggatcaataagattattgatattgttataaatttgagatgattcctgcttcccaagccaaatgcctgagaatcagcttaagtgttctagtctactcaccatacctccttcccacatcataaagcccacattgacctctttccactcgccatcgtaagcatccattgctcacatctctctgatctctcctcctcctatcttagctcagactgtccttatctctcccagacattggttcaacttgctaatttatctctcttccgtcatactgcctctactcaagtctcttccttacagcaatgacaatactgctcaaacttaacctttatcatggcacatttcaggtgaccaactccccagctttgttcctggggatgatggcttccctgaaatgaaaagacttgcaaaattagaagtggcagtttcaagagtactaggtcagctggtgactgtggtcttattgaccctttcaggtctctgtcctcatgagatggggttaattcacttatgtggatttgaaggtctcgttactgcttctccctccgttacaggcccatctcctctgttttgtcatggctttacttggatacttcttattcctacacctaaggtcctctatagtggatattcctctatgtgcttcgttctcacccttttcaccttctggagtctttaatgtccttttattgaaacacttttgtctggaaccttcaagagttctaagactgcatgtccagttttctctttttttgcctacccaattccaattcttcatagaactaactccaagtaatttccccatctggccactataatgttattgagaacaggagctgtgttgtactttgcccactttctagacagtctgggatccaggaggtcctcatgaaacagccattgtcaagataatcaatttcatgagaattatttgaggccttaagggcaattacttcccccaaaagtttatttctacatgttaccagtgtgttttagagccatatgaccaattaaaacttaaatattgatacttaaaatgtttgatttcactggttccttttttaaaaaaattaaattatcagaaacaaaagaaatgttaaccatatagtcattagacatttccagagcagtgtggcattttcaggatttttttttaaagagctgtttctgctcacttatgagaactgctggggaaatgcttccagggagcaggtccttacttccctccatggcactgtggcttccttttcttagcatcagacatgaatgctgcctttgattttcctgaggctctagaaataacaagccaaagtctctctctctctctctctctctctctctctctctctctctctctctctctctctctctctcacacacaacacacacacacacacacacacacacagaaactgccacttgcctcacagtactcacacatctccaacaagtggcccccaaagcctcagctgcagacatctttacatcctgactttaacccagaggaaacgtttctgaacaagggtggataagggatttcagcacaggactggggactcaaatgctaacatgcagggtgagatggtgtgggaatcactatcgtgattatagcactgcagacaatcagagtgagactgcaaccaggaaacaaggcccagggccaagctgcctttatcttactagccaaagcaggaagctttctgagagtcctttaagacagcaaggaaattttcccatccaggaacacctcgctgccttgtgtttaacttggctcctgttttcattagctgacatcttaggggtagtgactgaagtgtaaaaatgcagaaagaaggaatgccaatgatgaaatgtatacaatgaacgtcttggaatttcccaacgcatgattttcaaagagccacaagatggcattgtctgctatgggactgagctctgacacagcaagaactgacagcagagaccagaaggccaaattgtttcatattcctcatttgttttcaaaggccggccttcttcctgtttagtgtgctctgtgcccacggtgtgttgagttataaaagaaggtaagtgactggaaacaaagataggcagcctggagaagggtgttgcaatgatgtaagaagtaaacatcacaacagggtttggtggggagatagctgttgctttgactagctaccacaccagatgcaaagattccgtttgcacttatacattggtgtaaaggagatttagctctgatgtggctgtagttcaaatgattctgatatttgttcaaaataatcacctgttgaatattttattctttctctttgatatcatatatccacatacacagactattatagttctgtcacagtatgcataggatagaatggtgccttttacctcaagacagtggctgtggtaacctaacataagacaaatggaacatgttcataacaagtcccctgcactttataaacactgctcatttgaatcctcaacaatctcaagtacaatggtgtagacaatggagctgaggttagcaacgtattccaagatcaaaagtggtactctatgatttagccttagtaaatctgttccaacgggctcagggattttgccctgtgccacactgttcttagacactaaacagcagaactaaacaagcatgtgagttgtcccttcaactgcagcatccctgtctgtatcagtgtgatggactgcagctgcccatgtccagagccatgataggcagggccatgggtgccccatatttctgttctttaatgttctggttgaaatacctgagcaatagaatacaggccatcattggataatctcccttttacttcagtggaccacaaatgggtttgcattgatcatgcaacagagaaaactctggctatgaatcattatttttccagttcactccatgccatgttcagtgcatgcatggtcagtgtcatacataacaggccttaccttagtttaagaacctatagatgaggaaaaggtgacagtctgaggtgccttataaataagatatggtccctgttctcaagggacttagagtcaaatgagagttttctaagtgttatgaaagaggtaggcagtgaaaactaaatgaacagagagaatgctcactctgtctctggggttcagtgtgggtcagggaagtttcctagatttggatgcatcaggcttgaagaatgagttagaggggaagggattagctggattatatctttcccatatttcctacatttcactagacaccttctcagtaggagatgctctacccactctcatcagatgatgatttgaaggcataagggtgctttttcatctccccttccttcaggggtaccttatttctttccctgagagactcatatctagagatttcattatctatactctattaactttggcatcaactggacgtggctagttgatggagatgatcctactagcaacaggagagagcagtaattactacatacagcccttgcggatgttgtagttatgcctggtgctgaccccacctatgactatggtttctgttggaggcacagacttaactataactatcctatagctatcctgggaagcctatttgcactcatttcctgttgcttgtcctagcataccataatggctcatgttagctacttactctgccagtgctatgcctcattaaatcattatttcagccaaaaatgtcttgatgaatcccacacaaagagggcacataacgttcaggggaccctggctgataaaggtgagcaaaaagagatttaactattcccacgattatctttgatagtacccaacccaacccccgagagagaggaatgggagaacgtttagtgtcagtggactgaatgacatttgcagaaccatttccatttctagctcctcataaaagatggaatcaggaaggaatccatgactatgggtagagtgaatgaaatgcaatccactctagctagtatttcttgagttcttgagtatatgttaatggtgtgctggcaagaaagctccagagaaaataaggaaagtctttccttaacaagctcatagtctggatgagaaagaaacctaaatcaccagattaagaagaggtggtactatctagtgtaccctaggtttgctataacaacaaatcaattctgaagccaaggaaaggttacctttctttcctgtgatgtgtgtgtgtgtgtgtgtgtgtgtgtgtgtgtgtgtgtgtgtgtgaatgtatgtgtatttaagcagaagggagtataagagaggagacaggtgacagaggaaaagaaggagggcagataaggggaggcgtagaaggaagctaacaaaatgtgatatacgtgggaaatttttctacatgaaacttgacactatgtagaatgaacacataccaatttaaaaaggaatgcaaacaaaaataaaatggaattaatctgttagtagagagaatgcagaatgttccagctaaagagaatgatgtgtttaagagtaaggtagtgagggaaactgtggagtgttcagacacaggcatacctttttgcatagctcagacccatgagaacagaaaacatgggaaagtaaagcagagagagagagagagagagagagagagagagagagagagagagggtgtccgggtagccaaaggcaaaggcattattccccacacttaggattaggatttagtaatttaccctaaaggttgtgagaaaactgtaggatttcaaagacagggaaagtagcataagaaacaaaataagactaaggaatattaaaattgaaaacaatcctcctagaacaaaatgtattaggagaagtaaaatagagtgtgagtttaatctaggtacaaatagaaaagacaaaaaggaactgggtaatgataaacagaatacagtggacttggttctgtgtcatcatggggaattgaagagtgaagaagatggcactcaggacttctgactactgtttcttcatggaacatggtgtcattttgtaagctaaagaatgtagaatgtgatttattgaaaggccagatactcattcagtgtgctatgtgacaaatacaagacacatctccaagtggccttgcacagactagtgtccgcacattgtcacttatagttctcaaaataactgtagagagtgctaagaatgtaacactattaaaaaggcaggagccacagcatcactagctccatcccgttctcttctggtaaaggatgacatgtggtatgttaacctagcatttcatgtttcctctgggtgcaaaagacggtgaggatcatgctttccagggtcctttgactgcatagcaagcaagccacctgcacataagactatgaaggtaggtttaaggaagtctacaaatacccagataaagaattaacaagtatttattgggggagcactcacacaatgatggtaaatagccatcatggttttcatgctcctggtaatgtagcctctgcccttcaggatgctccaaccacaacccaagagagtgtgagacagcccctcctcttccttataagaagtcatgtctgcacacactgaagccacacccttgggtgtggccaccacccaaagtccactggcagaacaacatgccactacaagactgtacttccagcaagttttctataccttggaggaccacctagctatgaaccctgcacatttgctgtcccttgttacctattgtgggtaataaacctgcctcatgtattgtggccaagcactctttctttccagactggtgcaagtgacagatactggcacagcccaaggtacagtgggcaagatgttgataatctttcccaggaattgataccagtgtgcatcaagcctacttcacgttgaagctaaagtttctacaggatcacaggttaaagatggttcaggatcaagaccttggttagtgatatgaaactgagagatgatactggtggttacggagaacaagagaagagacaagagtgtcaagaaagaatggagaaagccagctcacgatgtacctacaagacacataatggatgagactgtctctgaacaaggagtttccgaggagagcttggtaagtcctgattcaggaggcaatggctatgtccagaagggaaacacagggcagtgtgaggtacagcatgagagtaaagcaaagagaaagaccatcaaatagggagtcggtgtgtatccattgcagaaggtcatcagaagccaagaagaaacaggaaaatagacctgagaatttcctagttatctatttgacaatatcttgggtaatatatctacaagaagcctggttattggtgttcttccttttcaattccaactaccatcttccaactcatgtagccttgcttagaaaagctttgcaactagaaagagccgatttgataaacttggggatttctcaggggggcagtctaaaactctccagtaatatgtccagttgttaatatttctcatacacagctatagggctcaggctacttactcttgctttgtttaatttcgaggacagttcagttatttcaattttacagattaagaatctgagtctcaggtagataatgtagcacacatggcattgaattactgacaaaagtcaggggcaaagtccacagtcacatcttcataatcccacagtgccagccaccagtcacccagtctcctgtgagtcattaaataggaaataccccatggtaacagaactctggaaacaggcaggcaaacaagaagggaatatcctgagtgtttaaacatcatcatggcaagtgtcctatctcaccagatttgtgctaatgccagacaaacactagcagagcaccccctagcatttatgccctggtcacaccctcttcacttggtatttcttgtttgatggcacatcctcccatcattaactctgtaaagtcatcaaagattagtgactgtactgcacatcactcttcccacaatcccattcagtgtttacaaggcacagtgaacttgggaagttgatgcctacatagtgccacacaggaataccttcacaaactatgtaggtgttacgataaatctttccgccaaatgctgcctgagccccaccctcacatgtgagctttacaccagccacctgcccaatttagacccaaatgaatacacagaaacttgtattaggtacaatgctgcttggccaatgactaggattctcatctgttagctcggtcttaattatcatacatctatatattttataagacttatcttatcggacaccttgttggcgtccctcctggccggtggatcacattgtgccactggagcaggagcggaggggaaaagcgggcccttcctatttctccttcacttaaatatgagtctccttgctatgtcacttcctgcctggatcagcacttctctactacatttcccagaatcctctttgactcctagtcctgcctaatttgccgtttcattggccaaacagtattttatttaacaatcaataagataaacatacacagtacattccccataatgtaggcttctgctgctgcctggtttgtggctagaaaagacaatggaaagtagaaattactgtcaaagggcttaagtgtatacaagaaaaccaaccaaatatatgctggagacaaatgaaattaaaagacaaatggtcttttaatatatgactatgattttgaaacaataataatctaataataagtgtctttagattcagtaattgacaagggggctgaatggggaggacaaactacctaaaggcatgctaaattactttttgggaatatagcaaccaattattaatttgtctttgactttggtaaagacttataattacctattttctaaatgtgaagtcaatctctaatacattgactatctgaatatttttatcctgactaccattataggagtttggtcaacccctatacaaaaaataccatcacagaaatcatgtaaaatcacagaaaaacatacaaaaatatgagaatacaacaaattaaagaagacataaaataagagagtttatacaaagtagttgtcatttgttctaattcccttattaaaacattaatattataaaatgatcacttttctttctttactgagagacaaacctctccaaaccaaaggcttatcatgtatggagctcataataaatgacaccgacaggcaatgtgggggtagtgaggggatcaccaaagactccataaatacaaagtgaacagaaataaaatggatattgttaatattaaagaggatagaattggaaggcaatattgcatgagatagaggtccagatatgtaatgaattctggtagacattactgttataaatcaatcaaagacttgatcaaaagaaacaactgaatgaaacatagggagaaactcaactgttaagagaggctatgggaagcatggtgaccaggaatcactactagttaggaatctcaagccttactagttagataacacctcccctcctgctctgctctgtgaatgtgtcccttgtccctggggtgaagaattacaaggccagactaatactagaaatgagggacatgaagagaaagtacagcctatccatgggcatagccattgcatgttccagaaggatcctgaaacaccatccacaatagctaagtagtactgtccccaggaatgtagcagattacaatggcaccaggatacgagaactggcttaggttctaaagtttggagctctttttcctgctgtactcatgccatgcatggaatttaggaggtgtgagggagctctgagatctcttagtatgctggctaggttgtttctttgcttgcttgcttgcttgcttgcttgcttgcttgcttgcttgcattttgtcagcttcacatagctagagttatctgagaggaaggaacctcatttgagaatatgcctctatacaattaggctgtgggcaagcccgcagaacattttctgaatccctgattgatatgggaggacccaaatcactgtgggttgtggtgatatcttgcttgtacaaataaagccaatcttcagatcagagaatggagtttgccactagctaatcatagaggacctccaagatcccatggggtgttcacttcattccacaagtccaattagtaacatatggagaaatcctctcaagtaactgtgcctagttctaactcccctactgagggaggacctcctacctgtcctattctgatcagcactctcacttcctttggggcatcttgaatacaaaataattttcaagagaaaaataccatagaagttcattgtagtagtggccctcatggcctctatcgttcagaataacaatccatatggatgttgtgattaaatgttaacatcgtgtgttaccatcatatgatggcttttaataattcatgtaaaggttccaatcttatcattggggaactgaggaggtgtgcaaagtcaaaatagtctatgctaagtctcatgctattataaaagattcccattgtcaccctggtgccaatggcaatttccttctcaataaatatttatatgataatgagatttgaatgggaaagtcagtggatacttgagatccatgtcttcctgtctctgagacatactggatatcaccctcaaagaagggtcatgaacattagtgcatagtcaaagccttattacagctatacccacagatacataaaattatctgccataataaggcaaataatctcagtgctcagagtccagaacattactgagtgactcacagtgcagcacattagtcagttttgaggacccataagaaaatgagtgtacttgcctttacatggctgcagctgaattcatcagcaactgagtgccacctgggataactcacctcttagagaattcgatgggcacatctgtaaagaccacaacctttaatattcctaggacttctcatccagtactgaaactgtgttccagtgtttgtcagtaagtaatacacaaacaccacacacacacacacacacacacacacacacacacacacacacacacacacacacacacacacacacacacacacacacacacacatacatttccagcatctacattttgacagtatcttaggtgactcctatatattttaagcatgagaaatattagactagcatgctcctttacccacagccagtttcctgaccagtttccaagactaagcaacctggagcattatccttgcaacttacagctttatagatgtctctcattccaaagcatgtccacagacctttatccagaaagacacacttggcccatgcctgatgactattgtcccaccttccacctcccctccaaagatttggagagtacttttagtaaagcaaaacattgttcagtacaataattttcacacaactttctcaaagctttccaagggcatgaaatgcaattaacactgctgtgaagtccacagttgttcactctgaggtcagccaaggcttttgttacctgacatataagcagctgtccccaactaatgcaaattgtcactgggatggggacttagtatgtacaagcgaaacaaatctgccctttggattggcatggaacaaaaacgtttgcctctttgctctgtctcccctgtcaactccatcccccagtcacctgactgtgcagccatgggcgtcaccgggctcactttcctttatgcaattcagtcctttttataatttctcccccgaggttctgctctattacacatttttgtttctgtagcccaggatttgggatctctgcagacacagtagagaggttaatccgagctgagataggtcggatctgttacactcgttctgatctatctgactgcctccctgctataccagcctgaaatctttggcactgtctcacatcatgtctctggtagagagctttccttcccccttttaaatgattttaaaggtcgctatgttttcattatggataatatagttaaatcttaaagtgccacaaagttaaatgcatacactaaatttgatagatatttccctattggagtcataaaatagaaacataagcaaagcaaagagttattttcaaactttggggatataaactggaaaatataccagatatggtagaattattgttgttcttgggtaatggaatcgtgaatgcaacatctggggtttttgttgttgttgttttgggtttttttctggatatgcttatatttttcctgccatgatagatacagatgtgctgtctactgacagagaggtacatggtttttcttcactacagacctgagcccactggctcctcatcaacgtgaagctgtcagggatgcctggaactcaggctttggtgaccaaaagcaccaagggatggtaggcttcctgcctcgaagccaaagatgaacctccattggaatatctcttgagcctatgtggagacttggtcataactctaaggtccataagtttgtcctggattttggattcagaaattgattcaaagaggaatacagattggcactggtaagaattgaatgcaaatcagcaccaagtctaacagatacccaggcttcttctggcaaggtcaaagagtcttagaaactgatgagtccagtgttttggtgcaccaaacatgatgttagatcacttacatctggattcctctgaacacatgattggcatctattctgctcagcacagtgcttaccctagaaatccatacttcaggaaccttttatgagtcaaagatcaagccccctggggctacccaatacaagaagcttatagtcatgggatcttgtcttcagtgagttttagacccagagacaaacaacattgttggagctctgggtctcaagagccatgggtagatacatgggccatatcaaggtacttcaaggagttgtacttttgaagaaaagagatcaacaccttcagaatggtaaatatctatccttcaaaagctcattccttgtcttaatctgtagaaactgcagccgagggctgaagccagaacaaatccaggaacccatcttcccttgtgaaagaagccacaaatcagattaagaaccagaaacacctctcttcttcctctcattcctctcctccctgcttctgttccttcttctccaatttattctctattcctagcagccctacctatcctctttcctaccaatccctagttactggccattcagccttttattagaccaatcaggtgccttaggcaggcaacatgcaatagatgaaacacatctttacacaattaaacacacatccttacatcgttaaaccaatgcagcataaacaaatgtaacacacctttacacagttatggtaatattctgcagcataaacaaatgtaacacgtctttgcctagtttaaataatattccacaataacacctcagttcaccaaatgactctttttaaaaatttctcctcagagatgtcctcgacagaactgagagatggcttgtaaaaagatcctactacataattgttccatatccatggctctgctgtgtcaaatgtctgaatgtttctagaagaagaaaaacatgctctgtgttagcaacacataacatacgatggttttgaatccactcctccaactaacttcaaagagagcatttgtttagcaattagtcctcagtattttttcacttggtctataaaatcactctggctatggagacactggcaaaggtggctgagggcatccttcacaccgctttcatctcgctgaagggacaccccagctttccacttcagagtctcagagccataatcaccgggagggagctgatggattgcactctggttctgaaggaccagctcatacatcaatgtctcccaaagcttctgggggctttgtttttatgaaaaggtgaagccacccgggaggaacagctgtttgtttggtttgttttccgaacacgcctttcaagatgccactgtggccactgatgcttatggtgtagtccacatctcccactgggttgtgattaaaaattgtgagcatcatggatccacctctcttctgcttgtgtgcttgtgtgttgattaatgaagtctcatttgtagtttctcggtgtacatggctgaactgctacgtcctcatctgatgattctttttcaacttatgaatgggtaagttccaaatgtctgtgtataagttgagttttctttcaaagtcagagcccacgtagaaataagattagaagctatgctgatggcttcctcctgtctccttaagcgatcacacatttcctctatgccttcaatgaaatacagttaataacagcaaaagaaaaaactttttctactctgcatatttctataagaacaattttaattaaaggaagatctggcatcaagtgggaactttagtgacaatataaataattggactctttctgaagcttcagggtatcatggtaattagccaatttcagatcttgtgctgttatttacttaatcagatgtgctaaccactcacgcttacaagaacatgtcatcttatctttcctctttggatgtcaattataatgaagatagagaaaaagaaagataggataaaaaaaaaactaaagaatttttgctgtgatgtcttgagtaaaagttaaacaagatatgatacaaaacatggttatataaaaagaataaatatatgactcagagtgtgaaattaactgatctgtgctccgtagaattcctaggttatgaagtatggcctgtgaccaactttacataaaagaacattataatgtgggggttcacaaagtgtgacgcccaggaggacagcactccagtacttcttcccctgggaactgttagaaatgaaaactatcaggcctctccttagacctgctggctcaaccctgggaatggaccagagtctgtttcaggatgtcttaggggagattctgaaggctacccactcaaaagcacagcagaaactctgggatgcagcatttcctgcatggccactaggtggctctgttgctcaggacagactggttagggaggggagcagggcgtcagatgatggaatggatgccactctaaggtggacgagggatgtctcttacttgttgcttcaatttatctccaagtaagcatctcctgtcctaactttccaaggacaatcacaggacaccactatggttttactgacaagtatagaaattggtattagtttgtagaatataaaatgttttctgtgctgtattaccaaatattactattactatctaaaaactgcacttactccttgggtctacttctgacttccttcatttcctaccccttcaccctttgtggggtgggacttatactgaaccccagcatctttcatcataacatgttctagattcaacctcactttaaggcccaggccccacccgaatgatcaggtattggagaaacaggacagcagagtccactggtttaaaagggtaccaggaagatgagccagctagagccaaggttcattgcagcagactttgggctgcataagcttttagatctgtactcaggagatgtccctgttcaaatgcttcttataagacaatgtaaattcttcaaagtaaaagcacaataaagattcatatgaatatttttttaggcatcagcatttttatttatgaaaataaaaagactttttcactcacagggtgagtgggaaaggatctctccatacacagtctgtgggattttcaagaagaccgaagtccttgaagggtacctctaacagtctgcatgacctttgtcattcattaataatggacattctcatctatggcagttgaaatcttcagcctttatcagagatggtatgcctatagtaaagaaaatcacacatatctaaagcaaaatagcattcctcttctttggtttttggtagctctctggtttagcaaataggccagcggttggagacattcttagattcagaaatcaaaagctgatgataaatcatttactatactggggtgggagtaaatagtatagtatccactatactctaggaaatgtagcatactttcatatatatatatatatatatatatattatatatatatatatatatatatatttactatttactatgccatactcatacactcatggttagaggtatctgtgtaaaattttaggatattaatttttaaattgagagagaatttggacatcgcagaattattactttgcctggctaaatagatacagtgaaagtaagaccattatttctcgtaaagatcctgtttcagtactcatccgtgctgaatataccttgtaagtttcagttaatatcagggttggagggggaagccatggtgaaaatgaaggtggcatgctgctgctggctaacagctggtctccccaagtgtgggagggagttctaggctgcacagttagatacaggagctaaatatcaagttacctttagagtcagggaagaactatatgcttaggaacaaacagtacccatggggtttcattaagttctagaaaaactttttgcagttaaataaaaaagattggaaatgacaagctggagttgacaaatgaccagaaataagaccactgcctacctataatgacacagactggccacctcttgggtcctctactcaatttcatgaaagttgaaattagttcggattctggaaaacacttggaagccaagaaaggctgaagcctcaaggtgcaggctacatctgaaggtagatttggggcactgagatgagaaagaggcgccatagaaaaaaatcgatgatcacgtttctaatccatgtaaatcttagcgttgactgtcaatggacttgggggtggcgagacagtaaaacgagagaagagtgagaataaccacaaaggttagatgctttttattttacctgaacattaagatgattttaaccctacagtattgttattgatcatacaattaaaattaagtggagaaagggacccttcccacatccttgaaacttttatctgacttcacagctcagttgctcctttttctagtttgtatcgttctcaaagccctggatggcatggcagcaggtgttctaagtgttacagacggtgtcactgtggggcttacagctttctgctttaagagcctatgttgcactgacacagggcagggcagaggttaaatgagcctcctacacttgaataacggtcctcagccacaaggcttgaataactagtgtgctttctctcctttcctagtgagacaattcacacagcacaacctgcctctgtattacaaggttccaagtgtcccacccacctgctctgggattcaaagtcacagctaagtgcactgacttcacccctatcatgtaaataaatttatcacaccgcactgatatccttggggacatttctgcagaaataaaatctaataagtataacattgatgtgtacttatatttaacaacaaaatgattacattaaggttttgtatttactgaccaaatctggcttgatatttgggaccaaatgaggtgggcttgaatggctagcagagccagggcagctgaagaagactttcatgctggcttttcctctgctgtgcactttttcatggaaaaataaggctggtccttccatcacagtgggaacactggacttccaaaggctctgttaatggcatgtaagtgaaatgtgagcatatgaatgtttccttttatataatatttgatatgaacaaaaccccagaacaattaaaggaacttcgagaaccacaaatgattccaggccataattaaaaataagggaatgcattaacatatgatggaattccaatctatgtcatttacattcatataggatgaaggagatagacattgcattaacatattgtggtattgtctctctccccagtaatctatatgaatgaggaggtcggggaagaataggaggagaaaaaagatagtaatttttacacccatttcaagttttggtttaaacatttgtcccagaaaacattttggcaagaaacacacatttcccagctgcctctgaaagagcaagttgcaatctcttttataatatccttcgcaactaagtatttccttgggaaattgcctggaaagttcataacaactaaggataaaataactttttggtgaaatagccacatctacaagccaaggagagacattgtcaggatcagatacaactcccagatgccaaactgtccgtgtgttaccagactcttgagttttccatttaagtgaagcatttgtagaatggattagtaggcacctgaggaggatttggacaaatctgaggatacagggtctgccctatccatcccagctcctgggatgcgaagactatggggataagactgggttctttgctgctaggggcatctgagataatttagaacttgtgagcctgtgactgagaaagatagttcacagacacatttgcaaactgttaagtttgcccagttctcacctttcagaaaggaaaatccctaaataggtttggtggttccacaattgattatgttggtatttcatgcccaaagcattgtccctgccagttgtcaatttaagaatccagtttgaaggagtcaacaataatgcaggcatgaccttcttgtttagcaaactcaacatttccagggaatcaatctggggtcgggttttggattagttctctccaagaaaagaaggtgtatcccttgattgagcgagccacctgagagctcaggagaaagtacttaaagctcaggtttatttcaagagcaaaggcagctgaacccattcccctgtcctccccaggcagagaactacagacgaagcaaagaaatggggtgggagtggtacacactgtgctaggtgcattatgtagacttagtatatttttacattgatcaaatgtgttgactgtgctcagggtactacacttttgtatataataaagccaacagccacaaagaacactgctggcagagttaaaatttaaatctccatctgcttctttatcctgtgtcacaaaatctcccattcaaagaatagacatcaagcttatgtttttctctctcctccttaggtattacataggtagagatggaatgagtgtaaactctgggagtttgatgagatataggtaacacaaaagttgaatagagatgctaaaagatacaaagtggtaaatttggatgcacacatattgccattggacaagatcttaaaagaagacccctttgccagtaatttgagaaaggtgaggtcacaggctctgaggtcatggggtatgttaggtaaaacagctagagctttgttaggacatcggagttccttccatgcactctatgtagctcttccttttaaatgtgttagaagcacctattcaatgctaaataacaaaggaacagacccccttgatttaaaccccatagtaagttaaaatgaaagagggatcagctccccaccaaatctctccagactcctatctctgggttgtgaactctgtcttggtctcagattctgatgagtttggacagattccaagggtcacagaacatgagtgtgaaatgcatatattcacgttcactgggtaataactcagttgaatgactgcctgagaggcacaaagccacacattggttcagtctggtatacccactgcagcgatttatgggaccagtgaggagaagccttctggggtgagttggctgtagggaggagtttcttggtttccagcagcatgtcctatagaaaccatctcagacagttgactgtcatccatctcagctcagagaaaactaacttttcatgctttcacttcatcacagcaacaggttaagcagaggttttgcccaagtggagaaaaattaacgtgtgactttgtgagcatgccaggcacgttgaggaaaagcagagcaatttcagatgtcagggcgctagccacatcatcagttaactgtgggtcctgactatgttccttctctctaagcctctgtgaactcctctgtgaaatggatgagttgaaaatgatctagaaggatccttctagtttaaaggtcagtaaagattgaatatgcatacctaggttgctgtagcctggacagaaaaacagccaaggaacacattgcctcataggtctggcaaagagtaacaacagccactttctacctgatttagatacttccatgatttaacccatttaatctcataacaactcaatgaaaataacatacctcattgttatccttgtctcattttacagagaggaaactgagacttgtacagaataacttccctgggtcacaaatttaaattaatgagtatacaaagcaccatggggacagagaaaaccctaatagaagagatgatacaatacatgaatgattaactccaaatttatacattgaaataataatatccagtgtgatgatacaatcagaacacaaataacaacacaaaccctttctcccaaccaggggattacatctctacacacaacattgcttgtcttgcaacagcatctccttaaatgtccctcattatgggatcataagactactattcttgccttccaaagccaatgccctaagcttcatccataaaactgaaggagggaaagagaagcataaacatattacctttttttatccaggacaccaggactcaaacataggcaggcaagaaacagaatgtaggtgacacagagaatagagtgacaaccagaggttcataaggtcctcatatgtagacttcaagaaccacaacaatgactagcatggcatgataaccctaagtagtagcatgcatactctggcagtaaccaacaactgttgaaaaagtttggtagtatcctttttatttagtgtagaattaccacatgagccagtattctgctcataggtatatatgaaataataacaaaagcaacatttaacacaaatacagacactgattgagaagaattatattctatattgtaattatcaataagtagaaccagcataaatatttgtgaatttatgaaagagtaagtcaaatgtggtatatctatcagccttttagaagaaataaaacatataaagtgttgaaccaattgcagcatggccaagccttgagggttttatatttagtgaaagaagtcagtcccaacagaccacttttatataaaatatccataatagtaaaatgtgcaaagtaaattagtggttacccatgactggggccatgagggaatctaactgtcaatggttatggagtttctttttagggttgttaagatgttccaaacatttgtggtagctacatgtgctcaaacctgttgagttatacatattaagtagatgaactttattccatgttggttatatcccaataaggcattaaaatatataacatataaattgtatctgctttctccaagggactttttctccttcaatttacagtcaagaaatgtggctgcaatgttgctcaaattttggatatttcctcagttatatttttgtgaggtttgtggagggacccagctaagaaaaattttaacactgagaaaagaactgtttaaattctagcatgagtcctgcctacccctgttctggtttttctggatatctttggatagtagagcttgaagtcaacccagcatgactctcttacttgtttgcccagtttcataatgagtaatgtaaaaaaattacttcttttagttttgagattataattataccatttattgccccctcctccctcctaacccttccacgttctcctcctggctttctttcaaatgcatggtaccttttccctgttaattattgctacatacatatatgtatatgaatttttaaaaatacatatttacaacatgatcattctgtataatgctacatgtatgtgtgtgttcagggctgactgtttgataccagatagccaattgctgcgctctttcctggggaagactatttctcccactttcagtacttcttagttgcctgtactttatgtagtgttgagacctcttagggttcccccagttccaaagactgtagtgaagaggccactggcttctcaacacagctattgccttctttgctgagcatgcaggtagaccatgaatcccagcagggcttgccacagtgtggctgaacaaaacagtgctctggctaatactttgaacagtcaaagctgtgtccataaatttttcatgcactacagtgcttggggtgctgaattatggaataaatgtttttcttctccttttaaaaattgtgacagtgactcggagagcattctgaaagacgcctggaaataatgtaaagcctgaggatgggaggagaattgtgagatgttgacttctgcacatcgtgtggctgttgcacaaatcagctcacagcagttgtggatacctgtgcaagagcagcataacattaagccagtcaaaatcgcagcatgagtactgacagtgacccctgaaaccaccctgtagtataggagctattggaagttgacggcttttgagggcaggagagtcactctcctttgaggatgtagttactggtggattgcccatgctccagtgcatggtccaacacccatgcacatattgtcaagactagttagactcagaaggacttgaagttggggtatggaaaattaggggcagctagaggatggtaatggtagataaatatgatcaaactactctgcatccatatgtaagagagaaaacatatatgtattttggagtctaggttaccttacacaagatgatatttttttctagctccattaatttacctgcaattttcatttttctttctattttttcttttgctttatggaaatgtattgattttccaatggaggggaaataaaatatagtattattgagggataaagtagaaaatacattaggaggattaaaaatggaggggtgggaaagaaaggtaaataaggggatataggaagggacatctaacactaaaggccatttgaaaagctatatgaaaatccattgctgtagaagcatgtcaaaatttctacatatatgaaaggactctaaatggtgtcaccaaataataggggaggcaatgccccaattagacaccaagtaaaacctccagagccaggaatagattatatcttgttgagtcattggccaaaggggtcccagagaatctccccaacatcatcagctattgccaaggctatgggttgctctttacatctgatggtgtaattgtaccacaaatccattggttggatttaaaacccattccatgagatggaaccaatacctgacagtactaaagtgggcaagaacatgatactagatagatcatgggactagaggaaaactaacactattattataccaaagaaatacagcaataaaattagtcctaacgatatactgctatagcatgggtcattgtctcattcaacccacagtagagaagcttctccttgcagtagatgggaattaacacagagacctactactggacaatgtgcaggaagtaagagactttggaggcacttacccctaaatggaatgtctttatcaaatccttcccctcgaggctcagggatctatgcagaagaggaggcagaaagattgtaagagccaggggcaatgaatggctctaagcaaacagtgtttttcacacacaaacagacgaatgctcatgtgaaaacacagaaacaggcagcacaaacaagagctacatagatcaagctatgcatggtcccagaattgaggaaggaatggttatagtttcccacccctaaccaagaagctctctgtaattgacacccatgggtaaagggaaaattagttttctgtaatggagtgacactggcttatatcaaccacactccaatacgggccccataccaacatgaattggactccaaggttatttatttattcattcatccattcatttattaattttgatttgcttttgatttttaagagaaagaaaacaggaagttggataggtagcaaggaggaggaggatctgggaggagttagagtagggcaaagaatatgatcaaattatacgagtttcaaaaaataaactttttagaaagaaacaacaacaaaaataagaaaggctattccggatttggactttaagtaattgttatgcactgttatgtgaactaatccagctaccatggcagccagatttttctaaaaaaaaaaaaaacttaaaaacacaattaccatatagcctagatatatcactcctgggtgtctagtgatcaaaagatctccagtcaacacatagcaaagacatatgcacattaatgttcatttaagaactactcacaatagctaagttatggaaccaacttcatacagcaatggatgaagaaaaaaaaatatatatatatatatatttcagtcagagaaaaatggagttgtgtgtgttttaggaaaaattggtacaactgcagacaatcacattaaattctgtcagtctcagaaaggtaaccatcacatgctttctctcatgtgtgggtcatagatttcatataaatacataaaatcgcgtatgtatatatagcacagaactggaagtaaaactgactatgggaacaaggaagggaggagtgagagaggagaatgtagagacaggagaatatagggtttatatgggaataggctcaagtacaatatatacttgtatgaaaatgttcttatgtaaaacagcactatgtacaacaaatatgcacgattaaaatattgtttgaaaaggactggtattaaggtgggtagacagcttattacccaagcatcatgagcatttgagtctgaattcctagcattcacataaaagcaaggtacagtgccacacgcctgtcatcctagcactggggagtgcaggatataagtgaatcccaggggtttgttggccagccagtctagctgaaatggtaaggccaggttcaccaagagactgccttaaaacatcaccattataatcatcatcatcatcatcatcaaataatagtaataacaatgagagaagtgattgaaggaatcctcttgatgtcaatctctagtctccatatgccaacctctggcctccacacaggccagggcacttacacacagaagtacacacatgcatatagctacattgcacacacacacacacacacacacacacacacacacacacacacacacacacatatatatatatatgaatactgttaaataaagagttacaaatttaaaaatagtttaagtaataaaaaacaatacttgttgtaactgtttttcggttgtctatgacaaacttgttgtaataccagctcccaattggctcccaacaaatagcagttcccaccaaactatcagtctcctccctttccctgtgtgagtggttctctcttgtccgacctctacaatctaatttgcgcatcagatttcagagggagaactttctatgatgggtgaggaggcttacatcatccctgtcacaggaaccattccactcacttgcttactgacttaattgtcatttcttttatcaagttgtacctccaacaacttttgggattttttttaaaacactaacttatttctagtacattgcagggacaaaacacagtagttctcccaatagccaagagctttccttcccatctttctgacattagtcaatgtcactctctagccaatctctggatgttcaatatgagtatatgcatttcattaaaatgatcatacactgtgaggattatggtatgattggcatgcccttgaaataaattaaaggtttatatcttatcactcaaaacttgctaatgactgaaaacattaaattaacccattgcttaaaatgattactccttttgaggcaagtctacacctagtgagggtactagctatgtttcactcattgttgtgtcttcgctcctgataaagggtacagtgaaaaatcttttgattgatcaaatcagttattcctctacggttactctattttatcatgctagaatctagggatgtccaagtttcttttcggagtagtaaaactgttgattttcagctcatgctttttcatgcatagaattgtgctgaagtttcctatagtttgtctctgacagaagaattttctcattacttcccccaccatggtgacagaatacctaatggcaatgtaggggaagaaggctttgttgtggctcacagtttaggagacagtctatcctggcagggagggcatggcactggggacacttagagccatgatagtgggagcttgcaatcatagctggctgacatagtggccactgactagggaggtgagagatggagaaggcggacacaggctctaacccataatgcgtgcctgctagcaacttatttcttccagctaagtcccatgtcctaagggttctgaaacctccaagaacagttccactaagagttcaagcataagtgtcttggcaggtgggttcattgagaccacaacacaaagcgatttaaatttgaccacttgacacttgaagaacctgggaatcagagaagcctttggggtttcaaaattcacagagctattaggtgatgacatcaagacgaattcaaaacattctgtacaaggctcttgacaactggccctactatgcggagcttcagcactctgaacaatacaggcttcctttggggttctgtcagtagtaagtctcagaattcattctttttccatttaaggatatttaagctgcttgttgaattttaaaaattaaatgaaacttatacatttttttttagtaccatatgccttccagtgtatcttgtttttaaatctcagaacttagcagaggagggaatctggagcgacagtttgcctagtgaagcccttgctttgtactaagtttgatccctagaacctatattttaaagatcctggagtagtgagttttatgtgcctgcaatcccagcacagagaaggcagacacaggaggatcctcaaggtctggggaatggccagctgaacctaactggtggtctctatctcaaaaaaaaaaaaaaaaggtagacagctcctgaaaatttgactttaaatgttgatctctgttttcttcaagaacaacacacacacacacacacacacacacacacacacacacacgggttgggggtgattgtgcatggggataatatatatttttctattggtgccatagcaaaagaaaacacattttgtggccagaaaaacagatatttattatcttatagttctgaaagttagagagtccctggtgattcatgtaattcaatggggtcatccaaataatctaaaatgacttaacttttctcagagacgccaagtattacattccgtgtatttagggatcattattctgcctaccgaaggctatttccccactttccatagaatatttcttcatcaaaagttccttatagtgatgataaaactgttcaacccaactcaattccatttatttcttcaattcaataaagcctcaccatgtaggagctctctgatgaatgctctggggaaaaacaaaacactggagctgtgcattatggctgaggatcacaagagtttatgacctggcttgatagacatggtatatataggagaattaactagatcaaaaaaagtcctgcatcatgcttaaaattaaaatcacaatgcaggtattttgtccactggattacttaggagatataatcctaaatgttctctggtttatggagcagggaaacatgctagcacagtgtagaaacatcagttatgttcattgccaattttaacttggtcctgaggaggtctgcaggaaaagaaacagaatcccctaaggaatgagtaactcacctaagggtgtacagaaaataaactcggaagagccttatttaaatccattatgtctgattccaaaggaaacactctttccacatatgcctctagacaaaactgaattgtccaccccaccccacccccaaaattggattattctgacttccacctctagtcggacatcaagctaaggagctgtgcatgctttgcaaaataaagtcttatttcactcttgtatgaggtgagactaaaggatgggcttaaaaaacaaaagccaagtcctcatctctttgaaagccaagcacttagttttcttcagtgttccctgaacaatgaattcccagacacaactgacaagttttgtttctggttattcacttgatacctcccatttgaaaactgaaaaccgatatgttgacttcagctcattaacaatggcatctacaataaatacatggtatgcctgacagatatcccttttcagtaactgctataaaaataagcctaacagtctgcaaattctcatggaaaaaattaatcatactggattaaaaagaatcactttgtgatttccacaggcattccttccaaagtcccaggctgaactttagcttcctcagtggtgtagagaaagagaaactataacttaacacaggtaaagctaactggagaagacagaatgcaggaaagaggaaaggagagctccacctgcccacaaagtgaggcacagagtccttggaggaattcaagagacttgagaggccccagctcttctttgaactgctgtggtaggcagctgagagcaggcaattactcgccaaggaggatgagactttccaaaggccacacagggagagatagcaaaggttcaaaggttcctcacaatgcagagaatgtttgacgaaaataggactaggttggggactgaaagaaaagggtgccttaattgctctcatactctccgcaacagttctcccatttttgttcctttgaaagcacttaaaagatgcatccaacttgtggaacatttcatatgcttttcccaaggcagggaaggaattaaacatagattctaaagtggcggtcagctcatggaagaattatgggtcaatcatttgcattgcaatttcaatctactgtgattcaattggaccagatcacttcacacacgtatttcaagaacccttttctttcagtattggcctaaatgaacagttcgtgatattttgtcgggcaggttcaaaggcagtgccctgccagctgacggataaaattgtgcatgagctgccttttgatcaaggtatctgtgatccagcaaaatacctctgaaggcagtcctcattctgatcttccctttgccttctgtaacagctaaagttggcaaagtaatcataaaagttgaggttagagagatggctcagtagttaagggtgctcacgcctcttgcagaggctccaagtctggttcccagcaccgatatttgacggctcaccacagtctgtaagtccaggtccaggggagtccaatgtctctggcttctgcaggcatctgcagtcacaattccatactctcatacacatacacacaattaaaaagaaaaaaaattacaacaggtaatcatagcctggggcaatatcaaagctaagcacatcctaaatgtaacacagggcgagggactgggttttcaacagaacaaaagcctgttaaaactcaggcaaagtatggaatttatttaatttcttggttttgaacaatattaactgtgacgttaatatttgaaaatgttagacaaagcagatatgggaacattctactatcttcaaattcttagtaagtctaaaatgactccaggatgaaaattaaatttaaaaggctgtgtcattaagtggatacactgtatttaagtggattggtccatgaggcatttcttttagaatttgttagtccttttccaatctcctctgtctagcagctgcttttccttaggtccggccttgtgttcttgaacgatctcttgatgtatgctgtggtgtcccacacaaaagcaggatgcatctgatgctgttttccagctaaataaggaagaggagagtacaggacaagactgtcacacacttaatgatgtgcaatttggatgcgatttgagggtgaataaaattactatttataaaatacggtagcccaacaaacttaacttcactaggattgtgctaccccaatgcccagtcacatgatttgtattaaaaaataagcagagaaattgatgtgagatgggaagggggaatcttagaatcacttttgaaaatttgtgctactccttatcattttgaccttcatacacctttcctgaaaatacaggatggcttgaccttgcaaagtcttcagaaattggtgctttacctggcttgtgaatgggcagcaacccagtagctgttccaggtccctctgttatttgtgtttcctgtcaggcccatcaataacaataacaacagcagaggcataatggactccacttctcccaagtttcagagatgcgttaaaaagaataagtccttttatcttatgaatttagtttaaattcctggctccttttgggggccattttagtattgttcagataagcatgacaggtaacaagagttattttaaggccatgcttagaagttcatgtggtttgtacctatgacttggattataaagtaaatattgcagggattcacacagtaagttctgagctttatttttaatttgcacccctgaataagaagtatgtgctcatgttgccactgtccataactactaaaattgctttgtgcaaagctcaacgtgcacagtgaaaatttttacattttacttattttctaccccttccaacaaaatgttaattgtacctaattgcctgatttataacctaacaatgttataaaatgtgcatgtaatgtgttgtaaaaaccagagagagagagagagagagagagagagtctaaaatttgacccagaaaaattgattttcaattttgttctgaaaatacttcactaaaactttaagctggaatcctcttagcctcttcacaaatcagctttattgcctagaaagccagaaaataaaaataagtctaactttgtaaggtggctttgagaattgcagcaataatggatatgaaagccccaggtacagaggagaatcataacacttttttttcttgtccatctaactgtattatcttatgttaggtgtggttccttcaagagaaataatcttaggaattcctccgagcccccatttttataactcggctcaattcccgctgtgttaaagaacagcatggcatttggcaacccaaacagaactgagacaagtggcataggttttagtccctcactgggtagaaatgggcacacagattctgggagtggagtccaagcgcatgtctaaacctagagaacaaggaatgcggaatgcagaaatggactccctcccctgcccggcctctctgtctgcaccacctctatttattcatccctagacatgctgaacaacaagaggacctgatgtgaggtgtttgctccattcagttgcacctgtgcaaaagcattagttaatgtctcactgaagtgttccacatgtttcttacctcaagccggcttagagacggcattctcacacgctcccttaatcctggcccctataaatcctttacaagtccctttctccattgtccctcctatccatcaagagataaagaacatgaagttgagtgggtagaagtggggaggtctggcaggcgttgggggagggaaaatgtgttctaaatacattgtgagttcgcaaacaataaaaagtgaaaacctacaaagagaacttgttgaaaccctctgatgcacacggtacatcttctcctgaggctcgatcacaaaagagctctctctgtcttcagccttttcttaccctttgcattgggggagtggggagggagagggcagacaattctacacatgtgaggatttgagaatagtgtgggacaacttcgcctggaaaagaatgggggggtatcctgcagcaaacataagtcctgagaggttttagtaaatcctattttatgtctaaaacaaagtgtgatacatttgacgagcattagtgagcaggtttgaggtcttcagataattttatagtcttctcatattgagcaatgagtcaaatctacatagataagctagattttctgttacttcctctggggtgttggatcgtggctcactttatgtgtcccagtattttctcttttagcacctttatcactattgccccttcaaagacattttaatgtgatttaaattcattattccaaataatttacaaaatttatatttagcagaggggcatcagtatgaccacacttacactcacagaaatgtccatgtgaacaactattcattcacatggaaaatctcctgaggtgaacacaacagcaggacaaagaacagaaataagcaaatgaaatggaggagaattgggaggacagtttctcatcacctctgtcagttacctccaaactcccatgcaagagagtaaagtaggagccttcttctctatggaccccagtgaccagtctgtcccagtgaaccccagcacagagactgactctatgccctaaacttcagcgatggagcccacaggtacaatccagcttggtatccagggaccaagacttctgtaccacatggctaagagccagactcataggtcaagcatctgtacttgggatctcttctgtcatttccacttaaatacccatctgaatgtgaatctgtgcccacctctatggacccaggaatcagactcaccccagtggatcccagaaccagaattctagtcaagcctaacttgggatgaaggtcattcccatgaccccagataccaaatctataggagtatccagatgctctacagaatcaggcctaccacagcatctcagctccatgtcaggtctcatggcctaccacagcatctcagctccaggttagctcctgtgaatagagactacagaggcttcttacagatcaaggctgtctgaacacctaagcaaacagaactggcaagcaacaccagtggcccaggatccagtctttaggactcagattctgagcctactccaaattcaccatatggaatactatgctacactctcccatgtggacccatgtaacaggctagctcctgtgtatctacctgctgacatgagcaccaagtctactcacctgagctctgtctaaaacctgccctgtatacaccatcacaaatggatgagcagaaagaatggcatccagaatggcatcccttgctgaagccagtcttgaaagagtgaaagaagcacccactacatagaatgtgtagatgccaatacaagggccacaaataatgagagaaccatgacatccctgaaagaacagaacatcacatacagaaccaaccctgaagaaacagaattgtatgaatggcctatgaagggttactaagtcatcaactctaaagagacaacaaacagaaaagaaccaggaaaacagcacataagtaaaacagaaagctccttaaagagacagaagacaagaaagagaagcacaccctggaggtggaacataaagactgaaaactgtaatatcctactgtgtttcacaagccgactcagtcaaaaagaaaaagaaccaatgaatttgaaagcagaccatttgaaatctggtatttcctcccttaaactagctgtgtgatatttctaattgtgaattaaattagagaaagtagccttacttttataaactatacagaagaaaaaataataaaagtgtgtggaaaaagtcatgggtcttgtaaaatatcatcaagcaaaatagtatgtaggggtttggggggagggttgagggaggggaaggagagggagaagggatgacatgtaaagcaagcttgttcctaatttgaactaataaaaaaaaaacattttacttcttcaatgattttgttaaatattttaacttttataattaatatcatacagtctaagcaataaaactgtcaaaaatagtacatgaaatttcatatctctgaaaaagagaaatggaagaacacttaaaggatgctaaccctgagatctagaaaaggagatgagcaaactattagaaaactaattaataaaaataatttcatacagagtaacacaaatgaacaagatacagaaaagaataatacatttattcaaagaggaaaagaaacctgtatatatagtgtaagaccctcggaaagcccaggcttccagaatcttagccaaggaccgaggctaccccaatcacagaatggaggcgaaagcttgatgcaaattgcatgaggctttattgtagtttaacgagctaaccccatgttagctcgagtctttgaaccacccgccaagtcggatggctagcaaagacagttcgaagccgctgcgtacagatctttatagggcagcgtaaggggagtgtctaagggtacgcacaggctcaggattggtgtgcctccaggcttggagggcttgccctgtgttgattggccaactggttgttatggcccataggccctcccagggtggttgctatgctttctgcgtcattgctgtgcgcttgtccgtaaagcacacctggagtcgtaaagcatacgactgattggctccttgtcacgagacaggcatctgactttctagtgactaacttctgattgtttccttgtcacgaggcaggcatctgactttctagtgtctaggacaaggtcatagaagcatgtgttcagccattatggctgccaaaagggaagctggtcccttcaataggaaactataaattattcatgaaagaaattgaaaataaaaatgaagggaaagacagccatgttcataactagaaaaaacattgttaaaaagtactttctatccaaaatgatctacagattcagtgaaatcctgatgaacagcccaatgtcatttgccacagagacagaggaagcaattctaaaatctgtatggaacctccaaagagcaaaaaaatccttgaaaaaaaaataaaactgtggctgaaataatttttcatgacttcaaaatatactacaagttatggtcactgcaaaagcatggtattgaaattaaaaataaagactaatagacaaatacactaatagactaatagacaatagagggccacagttagcctatgtatttatagttcattgatcttgactgaagttagcaagatcagttgatccatggaaaagacattctctttaataaatagtgttgatatgatgtgaagtgagttaagtcctatgcaagagaaataaatgatatgtagtttcattcctatggtgaattataaaagaaattgaactcatagaagttgagaaaagtcctttgggagaaatggataaagaaagatggataaacagattcaagttataattagaagtaatttctcatgacctactgcatagtactgtgactatccatagcaataaagcatcatttatttcaaaataactaaaataaaatccataatgtttttaatcaaatatcaattataaatgtttgaggagatagaaatatttactcttatttgaaaattatgtaatttatacttgtaatgaaacataacatagtatttcataaatatgtaccaaagtttattggtcagctaaatagtttaatatttttaatactaaatagaagatgtgaaaataaatggggaagagcaaattgaacatacatatatggaaaaatgaaactggatccttatacctcaaacaaaactcaactctaacagattaaagactttaagcataaacctgaaatgataaaactactagaagaaaacaggcaccttcttagcattgggccagaaatgactccctatgcattagcttataagcacaaaagaaaaaaataaaacaaaacagacaaatgatcttgtatcaagttaaaaagtgtacagaaaagaaaataataaacaaataatggaaccatcaaaggaatgagaggcatatttgcaaatgctttatataaggggttaatgccccaactacataaggcattcaagaaacttagaaaaaaacaatctgattgaaaaaataacaaggatctagatagatatttctcaaaagaagacatacaaatgccaagtaggtatgttgaaaaaactgttcatcaaccttaatcattaggggaaagccaaccacctttgaccacagtgagcaatcccccatgttctcttggaaaaagattacagttaattttaatgatgaagtagcaagccatgaggctgtggagagggaaagttgatacatcattggtaagaatgatatgaccatcatgacaaacaagatagaggcacaaaaattacaaaacttgactactgcaaaacaggcccaaagtaaataaaaatcagtgtaaccaagacacacccatgctcctatatttattgcagatctgttcacaatagtcaaaaagtggaaataacctgaatacagtgataaccagaggaaattttcacacacacaatggactattagtcaaccacaaaactgaacataatttagctgccctccttaatctcagcatctgaacccaaggtgacataataatgccatatctcgaaagaaggtagaggagaagggaaggaggaaaagatggagggacagatggggaaagaaagaataaaagaagggagggaggaaggggggagggggggcagatagggagggaggacggaacatatagtcatttgtaacaatacagatggaactaaagatcattatggtaagtctaataggccaggcacagaaagacaaatagcatataatctaactcatatctaggctattaaaaaactgatctcatggaaattgaatataccagggtatttctctgaagcctggaaaataaggggttatgagggagtcactcagtcagtgagcaccaaggtatagtttcgagttagttctggtgtgttgttgctgtcccacagcactgcaaataaagataacaaaatgtactctacctttaataatgtagaagaaaggattttgaatatttttgacatatgggtgttgagtagaaatgtttagcctatcttaaacagtatacaatatatacatgtttcaaaacatttagtacctcttagatatgcacacattttacatttgtatgtaccagctaaaaataagtaactggaagtattgtttatctactgagaaacaaatgcattattctgaattttgtaggtatttcaatgtctaagttttcctaatccagaatattacagtcacattgtcagataagaatcccacggtaggatttttcacatttcctggaatattttattagataatcttttggattactatttattgcactacaacaatgtatcaaattccttattaatttgagcacatatcttgactggtcagtagttcacaaattcatttttatgatacactatcagtgacactaattttattagcattttggatgtctgtttttatctgtcagccccattttattagtcctcattaaatttgtcatgatgatctttagagctctacattttcatatgtttaaaaatgattgtcttaagttccaaatcttaactgtgatctattttagagctatatagtttaaactgggcatctgttggtcgctatgaaaagaagcccttttgaatgtgaacatttattcaattattttctgtgctcttcaatgaatgtttacaattttctatcttaaaaaattggtcaagacaagcatttgtactacacaacaaactgaaatttataatacatgacatgattattgcctataatataacacatgtaacatctatttttctttcagtacacatccattgtgatgtataacaaaagaaaacaaactggttgacttgaagaacataaagttattttctcacagctttagaagccagaaatccccacaaaaagtgtaaggaagatctttgcagctctgcacttggtagaggaataccccctagtcttttcctagcatctggtgggtacctacagtcttcggcattctttgcctatgcttcgtgcctaaatctgacttaatgtgtcaactgccactgtgtgtctcccatcttcccatggttgtctacttatgagaacaccaatcgtgttggaataaggaccatttcattacactccactttggctttatcttaactactaaaactttcaatcagaataaggaatgtttataagtcaataagaaaaaaatgtagaaaacacaatagaatgggggtgggaccatgaccaggcttgtattagttattttatgtctctgcaaaccaaaatatatgacagaaacaacttactggacaaaagattttatttctgctcctggtttcagaggctatcaacccatcatgtcaggaaggcatgatgggatatctcaagttgtggcagtgggaacatatggtgaaggcttttcacttcatagaaaaccagaaagccaaggaaaggaaatgccatcactttcctggcattctttttccaccttttatctatgtccctgaccacagaaatggttctctcaacagttaaaacctcccctcttcgattattctttactggaaatagccccacagacacacacagaaagtgcctcagtctcttgggctattctaaatggaatcaagttgaaaatgtacattaaccatcataaggttctctaccatagagaatgctctaatggactgaacacatagggaaatgtaatgcttcactagtcactgagagaaataaatggttaaaacaaacaaacaacaacagtaaaaacacctgacaaaatcaaactgacaaagatattgagaaactgaaattctcagatactactcagggaatatatcatcaagtaaaaaaaattatcatatctactaaaacagagttcaagtataattttgaccttgacattcccctcctatgtagagacctaccagatatgcttacacatgtccaccaaaacttgtcaaaatctccctggcagcattatttgcctttgaagtaaaacaacccaaattgcagtcgataataaaatggatatgtttataaatctatgcaatgaatatttatgcagtaataatacatttctagactatataaatatggataaaacttacaaatgtaatatttcataaaagaaaccatacacaaaagtcatattgtaggactgttatttatacagtgttcaaagttattcaaaactcatccatggctacggatctaggatagcctttctcttggggaaggattaatgggtagagaaatttttcaggggcctctaagatgtaggaatgctacatcctcatgggacagtatttatatggagatgcatttagcattttccctgttcttcctctaagtgaaacttgaataaaacgtttcacttggaagcaattctagactttgacaggcaaaacaaagtttgattcttagtaagatacaatgatttcctattagaggaaatactctccctctggtgtgcacttgaaccttggtccacaaacttgcataaatgtgaaggagaggatcttcaaaccatgagtgacctcccaaactaaaaccttattaccgctactacatgaacacaccatcatggtgtaatgtccaagtgcatggggccaagtggatcataaactgcagacatgagccaaaataagtcttttgtcctctcagtaggcatcaaatagtattgtttccagacacaaaaggaatctattttagctctcctttcaagacattatacacatacctccctgaacattatagtctacaggttatggggactataatgtctgtaaaggaaaaagagatctgtgggctggagaaatgtctcagtagataaacacatgccacacaagtgtgagaccctgtgtttagatccccagaactcatgttcctgattatcttattagccttagtgatgcacatagtaggacttcataaatattagttgactaaaaataaataactgaaaatgaatcaatgaaagcattcacttaaaggaatgtcagtaaattattgtgttacattgccaacctcagaatactagctcaagcatcaaatttatcaattctaaaagtggactcaatgtattaggcaagtgtttctgttactatttgatatttgaggacgtttttattctatccctctgatctcaagattcttgtagtccaaagttttcaccttttccttgataaagcaggtatatataactcttggaataggtcagaaaacccgtgtgtagaaaggtggtccagttttaatacaaaggctcctaacatgtttattttctgcttctcagctttactaactcaaaccaagcttctgggtttagccccacatactcataatgtccttgtttccatacaagaattaatcacatatcccttgcctctaaaagctttctgtttagtttttgtggaagaaattctcagcttaaaatatactttgtatgttttaactgtatggaatcttagcatttgctgtagctatggtacacagctggtccctggaatttcttccgtgagtgcaagttacacccagtgcacattaaatcccgtatctcatatccatgccctggtgactacttgtagcatttgtccttctgttactatttcactcagcacactgtatgcatcccaagtccatctgtgctgctgtatataaatgacagggcttcttttgtcctttttaagcctgaataatgttttgttttatgtaaataccacatttctttactcattcaaaaacaaaatcacagtgagatatcattgtacatatatagggtgattattgtttttcaaagggataacacgtattggtgagttgttgcaaaagttaaaaacagaacactatttacaacagataatatatggaaacaatccattaccaaactattcctaggaggtgcaccatgggtaagaccagtggcgaccctttaatacaatgcttcgtgtagtggtgaccccgccattattctaatgctacttcataactataattttcctactgttatgaatcataatgtaaatatctgataaatgacccgagaggtcacagcccacaggttgagaatcactggaataggcacctataaatggagaaacatacttcacttaaagacaagaactcttcttgacttagattttcttttccccttctaagccccctcatatcatatcctgtatctcatatccatgccctggtgactacttgtagcatttgtccttctgttactatttcactcagcacactgtatgcatcccaagtccatctgtgctgctgtatataaatgtttatgtttgttcactaaatttcacttgtttataatcacaagattttgcctccatccttcaaaatcagattcccaagctactattttctcattttaattaatcatttttgaatgttcttatttattgatgccttaaaatataaacgtacccttgatcctgcccctctgctcccccatttattcactccatctcgggccacagcaaatacagggaagcaatggacaggaaatgtcagatctactcagattgcttggtcaaatggaccttgaagtaaccacacccaagaaaattaataatctccatcttttctgagtcttgtgtttaatgtttaatgaccattctcagggtttctatgtaatacaggatggaggaacagagagagagaaaggaaaggagagaaagaggtagagagagagagaaaggaagggctctctggaataaaaagtgaaacaagctatttattcagtatttgcaaacaccaggcactctggcactctcaacacctggcactatccctgttctccattttaccaatgaggaaactacagaggatcttagttctttgctccagttcaccaataaggtaaacctcggacttgaaccctgaagctcaaattcagagctcatctccttactacccagaaaaaaatccacaaacaaaaaactacaaagttggagacagaaagtgaaaattgttagtataagaaaagtcccaggaaaaggcaggcatctcacaaatttccacccttcctaagagtacagatcttgtctccctctgatgtaagtacagcttgaatataattcattcaaagagcttggagcacaaatagttcagatttcaaagaattctaagttttgaaaccttcttttcacataaactgaaatcgcagagcgtttgtgaccccagtgttgaaaatgttccaacatctaagacttctgatgcatcagtttggcacgtaaaatgttgtaatctggggtcaataatgttcaatctgtgtttagttttatatattatatggattgttctgtcactccagaccagctacgggtgtgaagacacagcatttggtgaaatttatgacctccactctgttccaaatgtcccaccctcatcttctcattcctcttgtccagttttatgttagaacaagtctctccctagaagtcacaaagaattctcctcatgtatgaaaagagttgcattgtctcttctgccttttactttcttacttttcaaagattgaataaaactgtccctttttatggttgattaaaggggaaaatgtcagaactttgcttcctgtggcactgaaaacaacttggctggtacagctgggcagattgggctttcggagttctttccttgctaagatctactgctgactgactgctagggctccaggtgcaggatgagactaaccgggcttctgcacaagggtagcaagggtacatcaggcagataggctgtctttctgcttaacacttgggtctttcaagtcatcataagactatgcaatattaaatttaggacaaaatttaagcaaaagaagaaatcacagataaagaaaactggtgtttgtccccaaaccatcaataaaaggctcctagacacaggtaagtactaacattctcagtttcgtctctgttaccaattcaatgctggatctgtggaagtagttccccagtatggctcttacccaaagtgtacaatgtcttcagtttgatccctagctccataggggaaaaccaagaaaagatagctctcccagtattggtgtctccctctctccatccctccctcccttcctctctcttcccccaccatagtactaaagtcaattaatttgacaaaattgtcccaaacaatgtttcatagtatttcaagagcctccgttccatacctaacagtgtccagttttttctgtttaaaggtctttaatagagattatttttttaagtagagagtataagctccatactggaaatagcttcagaactgtctctgcatatgcattaactgccattttatgtttattaaaagcattaaaattaaataatactcgttctatctcaggtaaaaatgaccaatctaaactctaaggattgttacagtccacacataaaggcagaagcattctccatcatatttgggacttttccttggttcttgtgtatgactaataaaccttgtctctctaggtagcatttatgtcatatatttccagtaggtcaggtgctcctgtagcacagaattccaacctagggccacccttagcctcacatagttcatcaaactaacattttgcttttagtaaagccctgatgatacagctttctctggtgagttttatttaaacccaatgtctatattgagcagaattaaagtctgctaaagatctcagtgtttcctatgttaatcacttagttgatgatttgtagttacattcaaagaattacaactgccatttgagagaatatatatccctttgccaacttatgctcagctggtgctgtgtgggaaaatactgtttcaagaatcaggtggcagtttccaatggtgacatttacattgtattttgccagatagctccatttttcttgcataggtcctaggagaggtagtgatgtttattttaaaacaccaaatggttttattgtgtccttgtggtacaatttattaaggtatagtgttatgtaatatgctatagatatttaaaatatgcacttgggagagtttgccatacacagaaccaatgaaaccatcaccacagtaacaatagcaaacatttccatcgggtgatagaaaatgctcccttgggccctttttcactttatcgcttctactcttaccccaggagacattgatttgttttcatcagcagagctgagtttccattttctagacttataaataaaaggaattttcacaagcatttcattttggatgggtaggctgctttctttttctctgtagagaacttaggatttgcccacattttttgcataatatctgtagttcttttcttttaaatatggagaaatccattgtttatatatactctaaacacattttgtgtattttgcacccattgacaaacaactgctctcaagtaagcaatatagacacatactgttgtgtctttgagtggacatagataattaccaaagagaaataagagccatggattaaattcctgaataacatagagggtgggcatcacatttttactgctgaaggaaatagccagactgtttgagtttgttataacattcttatgtattcatcaacaatgttttcatagttcaaccattttgaccaacaccaggtattgtgggtcttttctaatttttctactgttgagaacatgacacagtttgttttattattaatttccactttcatgatgtcattggttttgtttaagtttagatgagtagagttttcattcattcacttaatatttattgagttacatctacacaccaggaactccaaaggtgctcactgttaaaggtgaaagtgagtttctaagcatatattcaataaagataagaaacaagaggagtgtcttagcatttttattgctgtgaaaagacaccatggagatacttataaagaaaaacatttaattgatgctggatgacaatttcagaggtttagtccattgtcatcatggcagggaacatggaaggatgcaggcaagcatggtgatagagatggagctgagagctctgtatcttggtttgcaggcacctggaagtaaactgagtcactctgagtgtagcttgagaataggagaccacaaactccacccccacaagtgacacactttctccaacaaggccacatgtcctaatagtgccactccctatggggaccactttcttttaaaccacaacaaagaggaagcagttattgtctttaagtactaaccaatgagaacactgaaaggagatgacatttgagccaaacattttaagaatgaatagaactctaacacatatagagaccacaaataaggtagtaatccttatgaaaaatttatattcacttaggaaaatgatttacttttaagttgagtgtgaacctagaaaataaagataggatatattgttacagatgattggggtcttctcataccaatccacagatatttccagaggtggagtttccccaggcaggaacacctgtgtaaaagatctatccatcacccttcttctagttcataatcttatacacagtgatactaagaaagtactccaaacaaatgtagtaattaaccaataagataaatgaccactttgttttattggaagggattcaaagataagacagtgtacactttcaaataagctaggcagatgactcataaacctgtgagaagccatgacctacaaaagaaaagcagactcttgtctcctaagctttccagaacttacatccagaaagaattaattatagcccctgctgcactatgataacaatttaggaataaactttcatgactaaacttttacttaagacttcttagtggatgagagttaatgtggtgaagctataattgttctttgcttcattcataacccttctcataaacaactaagtttcctcatatgatatctaacaaatgcccattataagattagaagcaacctgaaaatactcaaatatgtaaacatatgtactaaaagtgttttgtgttgcgtgtcatgcacatttgtggtgtcccataggaaagaaatcaaggcagagaaattcatcaggcctgaatagttagtgacatcagagatggtgcttcatgggatggaaggagttatatagcaaaaatgagctttgagaaatggagacaacagaggacaaatgggtaagtattgagtttcaagtgaaaaaaataccagctgatatggttggtgctcaggatcaatactttggttaatttccttaaacaaatacacatccagtgttgtaaagagcactgggagatgaactatggaaataatttgtcagaaagaatccatattcatagactatgccagccagtcatctgtttactgtaattctaatcactaaaagaagacaagactcagtgggtggatttggccaaaacagatcagtactcaggacatataaaaatagacagcatggatctattggcccttttgtttcaaactcctcttgttccaaaggatcagagccatggacacgaatgaccactgcatattcagagtgtggtgtcactgaggaacccaggctaaaggctcagctgcagaaatgactcagggccacagcaacgtaggctttgcagacaacatctttgttcctaatgttctgttactctgataaactatcgtgagcaaaatcaatgttagaataatttatttgggtttatagtcccttggagctagatgtctttaatggcaaggaagggatagcaacaggacaggaagccgagagacaccttcatcaacactctagaagctgagagagacaaactgaagttccagaaaactataaattgcccaagtatgtccccagtgatgcacttcatccagcaagacttcatttcctaaaagttccataacctcaaatacctgaacctatgagggaaatttcccattcaaacagcaacagcacccttagtgagcctgcacatgcatcctccaggtacatggtgggctgcctccttcaacgtccttgaaaatcagactaagaagttcagattctctaatgtgtacaatatggagttgctgacaagctttgaggaggagaataatttgaaaaggggagtatctggtagatatatagagaatgggatgaaaagactagaggcagagtaattggaaagcttgagaaaggggtttccctacagaaggaagaaaagcatggaaacagtgaacgttcaggaatgtgctggcaaggagccaggctaaccctgtttggtcaccacttagcataaccctgggccaggaagcaggaggaggggtttcttaccagtaccagctttctgctggtcgttactgtttagggccaccaatgtgagataatcaataaagttgagacgtgggaaaatgaaacatgaaaacttaggttggaagaaggaagtcaaactggaaggaagaagttgtaggaaagaattgcatttatgagttaatgagcaaaagtcacaagttaccccaaataaggaaaaaaaaaaaaggtaagagctgaggagacttaggcatctgccttccctgaacatccagtggtacccagttccttctcatgtaccttctctctctgcctgctgtgacatcctacccattgatggatgccatgctcattacagtctgagacatcagcaaggttaaaccacactcatacccccaccaccacttcagtgtgttaagtttcttttttcctgacctaatttttttttattcttccactcttggcactgtctgaccaagaaaacaaatgttcttgattgccttttgtttagtggggaatgtcttttaacagtttcatttatgtcagcctgggctgtggatctggggactggcttttcctattcacacaggaattacagggccattctctgtctttctccagcagtcagaagctgacaggtggagcccagtacagtgatttgctaggaattattctgtagacaatgcggactctaagagcaacttaccgtcgattttcacgttgtcattatttttttacttactattttatcttgtaaaatctggcaataggaatttaaggtggaagattaaacagtatttgtcataatagacacagatggggagacattttccattctttgctctgcctgcaggaacttgtgtagctgcaaggctttggatcttgcaacatggagggaactaaaaacaaagtatttatttaattttcttctttaactatttcaagactgtcttcttgaacatcggtggagcttattttcaggtaaccttgatatttcagacagaaaaatggcataccaggaactctgtcaatcagaatatagcagaagaagacaaaaggtatgtatcttgtttcttactatttcatgtggctaattaagaaatatctacagaagctcaagcaagacaaaagtctcagaatggaggaggggaagtaggtacaaagttatccctagttgaggagcaattggcatttgagtgctgctggcaaacagagaaccagttttcttcaatagtgtggcacctggtatatctaccacattccagggcaggccccaagcccaagtcagccagacttggttccttttgcagggagagtaggagacagaccaatacacacacacacacacacacacacacacacagagagagagagagagagagagagagagagagacagacagacagacagacagacagacagacagacagagacacacagagagacagacagagacacacagagagaaggggtaaaaacagacagagaacatgaagatggtcaagtataaaaatgggggccaatgtggaaggaaggagatggatgaggggatgaatatgatcaaaacaaattgtatgaaagtttcaaagagtaaatttttttgtttatttaaaagttttttttttttttgagccgggtgttggtggcacaggcctttaataccagcactagggaggcagaggcaagtggatctctgtgagttcaagaccagtctggtatataagagctagttccaggacagcctccaaagccacagagaaaccctgtctcaaaaaaaaaaaaaaaaccaaaaaaacaaaacaaaaagagtgtttttttttttttaaattttatataccaactacaattccccctccctcttctcctcctctcttccccaccttacccccacccaatccctcatccactcctcggtaaggtaagcccccccccaatggggagtcaacaaagtctggcatatcaagttgaggcaggaccaagcctctgccctctgaatttagactgagcaagatatccctccatatggaatgggctccaaaaagtcagttcatgtaccagggataaatcatggtcccactgctagtggcggcacagactgcccaagccacagaactgtcacccatctagttcagtgatatgcaggttccccagatatcagtccagattcagactgaatctgagctcctgctagcttgggtcagctgactttgtgggtttccccatcatgatcttgacccctttgctcatgaaatccctcctccctctcttcaattgcactccagtgcttagctgtggatctctgcttctgctgccatcagttactagatgaaggttctacgatgaaaattagggtggtcattgatctgattatagggggaggccagttcacacaccctctccactgttgttagaagtcttagctggggtcatcctgtggattcctgggagtttccctagcaccagatttctccctaaccccataatgcctccccctatcaagacatctctttccttgctctccctctctgtccatcccccaactcaaccatcctgctcccttgtgttttcattcccccctcccttttatccctccatcccctccattcttccctcccaatttactcaggaaatcatatctagttccccttcccagaggtatccatgcatgtctctcttagggtccttcttgttacctggcttctcaaggattatggactgtagcctggttatcctttgctctatgtctaatgtccacttgtgagtgagtatatacgtgtttgtctttccatgtctgagaaacttctgtaaggcaaaggacacagtcaacaagactaaatggcagcccacagaatgggaaaagatagtcactaaccccacatctgacagatggatgatttccaaaatatacaatgatctcaagaagccaggcatcaaaatcccaaataatccaatttaaaaatggggatcagatataaacagaattcttgacagaagagactcaatggtgccaggcattggtggtgcacgcctttaatcccagcctaatagctttgtccaatccaagcagccagacctaaatacataaacatataagcagcaataaattgtctcagtagattgaatatacatatacatacatatgtgtgtataaaacatacacatatattgatggtggatgtccttctgtatatatgtttctcttattggttgatgaataaaatactgtttggtgaatagagtcaggaagataggccagggcaaggagacaaggagaattctaggaaaggtaggcaggggagcctgccaaaaatgtcaccatgtagtcgacaaaggagaaacaggtccgagcccttctctggtaagccaagaccacatggaaatacttagatttagagaaatgggttaataattaaggcaaagctagccaataaaagtcctagccataagcaaatagtttagtcattattatagcatctctgagtgtttatttggggtggaagtggtggtaggacttggtggaacaagagaaaccttaaacaacaatatatgttatgaatttgagcagatacaagcagtgttggagtgggagaaagaaggtggaaatgatataaatagtctggtatgaaattatcaaaaactaaaaaatttaaactaaaagaaaaagaaaatcaatataagtagtactgaatgataagtctgaatatctgtattttaatcttagcacagaactagggaaatggatgagtcaggaaagtgccagccccctagaatttagattcctagaattcacataaaagataaaaacagtgttttacaaatggttctgttcataaaaaatactgattatacaagcatggtgacctaaactggatcctcagaatccacatcaaaaggccaggcacagtgacatacgcttgtaaccctatttctagaggggcaatgacaggaggatctctgggatttgctagccagcgactctggccaaatcattgagctcaagttcagtgaaagactcttgtctcaaaaaaaatagatacgaattgaggaagacagccttgtttgacatcatgcctccacatacaggcacacatacatatgtgcacacaagagacacacatatgaacatgcgtacacacactcatcatcacagatgttatctcttgacaattcagctcatctctatgacctttggcttctctctagctttagaaagaagaaacactttccctgtctgcttcaccatacactaaagcaccagaacagaggcacgaagtgctttggaatattcagagtttctgcaaagcatgagccatcagtagcagtcttgaaaatattattttatcaaaggtgagagtttatttcaataagcagacctatgaaggcttatctggtgcatggttgtaatcgttaatacctgtctatcaaaggacaagagttgtggtggtttgaatagaaatgaccctcagagaatacctgtatttgaatacttgatgcacagggagtggtaccattgggaggtatggctttgctggagtaggtagggccttgttggaggaagggtatcactaggggtggcctttgaggtctcagaagctcaattcagttcacttgctgctgcctgcagatctagattcagggttagtgttggggttagggttagatctagatatagaactctcagctccttctccagaaccatgtctgcctccacactgtgttgcttcctgccatgatgataatggactaaatctctaaactgtaactcagccccagttaaatgtttttctttgaaagagtttctgtggtcaaggtgtctcttcacaacaataaaatcctaactaagataagaatgaaaaattaaattctgtgcaggaaattctaaagacttcaattttcatattggtgaagtaaggatcaccaaaatcaactttaattgtttctgttttctttttgagcctttgatttccaggaactcaaaaagtgaagatgcctgttaattgtccccacccccttcccccactcccccaaaacttaatttaggcatagttaatattcctgaaataaaataaaaagatgtataaagagtatatggagtcaagaagaaaaggaaggaagaaggagggaggaagggaggggagggggagggagggaggggagggtgaagggagggaaggaagggagggaagaaagaaaaaagaagccactgttgactaactccagtactaacttcactttttgtaaggagtagttagaaaattacttgacggaaatatagaagaaatgctagtaaacatataaatatatgaaaatataaataatgaatatataaataatgttgtagatattaagttgggaggaatcaatggctgcccttggatacacatgaaaagaacattgtattttccctattaatgtattctgagttgtgttcatcatgattttgaacatgattgacaaatgtgtacctagatacagaaattcatattcacaaatatctagatatccaaactgctgtaataataaccatttgttagaagacagaggcaggtatgtgtttttttcctgcccacctatattgttttatattggagtcaccaatatgtaaagattggctttaatttgtgtagtgtgtagggaaaataagaaagagttgaagaaaaacattagtattcttgatccatgcttccagtttcacatgtcattccccaattgaaggaataagatcacatgggtatcacaaagtattcgaacctgattttggagtgcagcacatgtgttcacaatctccactgtgatgacctcctgccatgtgcacaggtcaaggtgatcaaatgatactctctctctaaatatgttcagtttgttacatgtgcatccataagcctattagagtattgttacaatttttaactgaaaacattaatgtatataagggatagtggaggaagaccattgtgaggcttgctttgctggcaactcactaagacatctttgccattttaacaatatacagacttcctttctactgatgttttgtttactaaaccctgttttcttttctgtttataccatagtctaacaagttatcacaatcacatgtctctcatttgacatggactgttctatgaattttcttctactgttacataccaaatgaccacactttgtgtgacttacaacaatgcattgttgcttgctttcatttctaagggttaaagttttgggtgtggcccgagttctcagccccacagcatgccaaactgcagcaaatgggtgggttctgggcagcctcacctgagccaagagtctcctcagtgtattctgttgatagaaagaatgcagctccttgtagtcatacgactcaagtcccgtttattcttggctatcaagccctcaccatatgtcccctttgaggatacctgaccacatggtcttttctttgaagtcagcaggaaaatagctattgctcttgcttcttccttttaaggacttccctagtaacaccagcctgcctggcgggtgggggtggggatgactcactcttgaggaactcaatgtcaactaaataggaaccataatacctattaagtttatttgcagagtgaggggatagcttccttagcaaagcacttgctccacctgagcacaagaacctgtgtccagatcctcagcatccatggaaaaatccaccattgttggacatgtctgtgaccctggtgctggcaactcagaggaatgagacaggcagatccctctggttttctggccaaccagtctagttgtcagtgagtcctgggctcagagagaggtcctgtttcacagagtcaggggagagtgatagaggaatacactgggtgtcaacctctggtctccctgtgcatatatacacatgtgcacacacataaacatgtactacacatggccacacacagacacacacacagacacacacacagacacacacacagacacacacacacacacacacacacacacacacacacacacagatcccctccccaaacacacacacaatccgttctgctatagaatgggacacaattgtgggagggatatccctctgtgttcaagcatggatcacaaaggcatgtgctccatgggtggaaactgggcttaacatcttaggattctacctagatcatatgtaactgaaacaaaattttactctaactgatacaaactttttcttttgttttcctgtctaggatgtcggtcttaaacatcaattttacctttattgttgtcacttttgacagcatgggaggagaaagaacccttaacagactcaagggatatattgaattgggtcttggaagttgatgagcctgttctgtttctatctatggtacttctgaattgctagcatgggaatcctgggtatatatatacataccaatgagaaccagaattgagcattagcactgaactagtagtggagtgaagggccaagtttggttgagaattagtgactctgctttgctagaaaggcttaccaagaacaccttgcatccctcagaatgactccacagtgcatcaacattcaaggagactctgcatatggccctatcatagcactgatatgtgtgtcagcacagccagacacacacctgactggccattgtacataggctttcagagccagcactaagacatggagggggtggcgagcataggtaataagaaaggaatgaaatacctaagtcttttacaaaacaaaacataaaaaaggcaagaccttggggtgtgtgtgtgtgaatgtcaattggctgagtaaaatgaggtttagatgaggagttagcttaggaattcagctaatcagaacaaaagcctgggcatagtcacccaaaaaaggctgggttatattacagcagcaaaaacaacaaatctgcaaatcttctgcagcaaaacttaattttttctcatctgttcatgtggtcacagtcatctgttatgatttgagtaggaaatgtgtccccaccccacacacattctatgtgcttgttccccagatggtggcattgttttgtgcagctgaggaacttttagagagtggggcctcatgggtagaaggagggcactaggagcaaaggctttgagttttgtttgtttggtatttgtgttgttggagctggaagtcaaggcctgtgcatgctaggcaagccttggtctaacatcccatctctgagggatgggcctttgaaggccatacccactggtttcccatcatgctctctgctccctgtctgccacattgttaccagtcttcagtcttcactgttcattatacactcccactgccaccagcagagctgtcaatcagaccttccccagtatgagggactgagactctcagaaaccaggagccaaaaaatcagtcttgccttttttcccttgagctgtttctgtcacatgttttgaatgcagtaaaacaaaagcaacaaccacacaacctttttaaagcagtcatcctccatgatgccagtcagtaatttaggttgacagaggctcctgtcgcctacagctgacccacctgaggtaaatatgctccttgtggatgacagtcaccttcagagtgatgaagatcagtttgtgccatatggttatccatagtaagttacacagccatctgtggaattaagggcatcatatatccctgtaaatctcagtttccttagttaaggtggctaatagtaccacacgatgctttcttataaggatttaggtagtaaagacactttatatatgttctgtacatggtagacattaggtaacaggtggccactattactaaggcacaaaacttggaaccaaataattatccagagtcacactgtgatccaaggctgtgggcggctatggtcatttttaggcccctgttcattctagcatttcactgttccttgggttgctagccaatgcatgagtttcatagccacattgtttctttttccattggatttgccatcctcgaacctcttaggtctcacttaagatgacaactcggcaaacccctcccagttcccacagggagggttactgcttgtctcctcagttagtggcgttaaaataaaataaaaataataataaaacagctacacttacaccgcttaccaaatccctattgcactgcactggggacgtgacccagactggtttacaaatacatattgaccctcctctgtgacaagcactgccctacttggtagagatgtaatagtgaacagaatgacacacttgtcattgtggaagctccattccagggtaatttgcaccagggtaaatgggactaggatggttagtcaagtaaaactccttgcctatagtttcatgactggaaaccattaatcttggacatcagacccattaatcccagggtgttctctaattactgttgggtgacatttccagtgggttccacaaaccctttggggaaaaatctcactagcagaagaaagcagatacatcactgtgaagtaatcacgctcttttctaaagtctttctgatgagttttttaggggcaggaccaatgtacgacacagaacttaataaaattgaggaccatctgtgatgaaagccctcatgatggtccagagtgtaggaactgagcctgcaagttggttttgagtccattacagagaggggatgagttagggaggtatcagcaagtggaggtaagctacagtaaacagcaaaagaggttgtcacctggcaggatatcttatgccaagttgtaaagcaatcaaaaaaaaatctgtgaatcttttttcttttatttttatgctcgcatcttacagccccctcttcttaggcaggctgagctactcacatggaaaatatcaagagggacaaagggatcatggagagaaggaaagataataagaagtgaggaagtttaagcagccaagattctgtagaaggaaggagaaagaaggccctgtgacaagctgatgtcagcacacatgggaagcctttccttgaggctgtgtgaatcagtaagaaactgattcaaaagataaaacagaggtccatagaggagtgttctggtgtatttctctggcctctgaatgggagaacagtacgcatgcacgcacacagacacagaaacacagagagacagacagacacacccatgatcagtgaatgaaataaactaatgttttaatctttttccttttgcttttcagttctagaatatgaatccaggaccctgtgcatagcaaacaaccacccagcactgagtacattcccagcactcaaggttttatgttgttacaagtagtaaatagtgcccaggcttctatcttgcttagacttctgtatgtataaggtagagacacatgacctggttggccctgagcttccactgggtacctagatgtcagagccaggtttttatgactttctttaattacttgtcaacacaagtaattagcttgagctccagtgattcccaacaataggagaaagctccttgcaaataccagaatgggaggagtgaactcagctcaaactcaaagcttagtgcctgccagatgtaatcctttctcttcagtgacagagctaatgagtggattgcaggattttgcacttcacctctgatgttttaaacacctcagataataatagaaatacatttatacagtgctttatgggggtggctcatttaatcctcacatcagtgcgagaatgaattattagccatgctttacagctgtagaaacagacgcttgaggagatcaaatgactggcctgaaatcacacagctggtatctgagacagtctaactttacccgggcgcttactttaccaatggctgataggctgaaacaaaagcctgcattttacaccgagtgggattcggtatcaatacaggcaaagggaatcaaatccagggagaggctgcctccaacccatgcctaaatagactgaggtgccctccccaacctacacacaacatacctcaagtcagacctagttaccaaatgcctgaaccatgagattcaaattttcttcacccagatatgtaatttagcttaataacttaaaatttagactatctacagtttcattttataactaataaacactcaaattagaagataaaacccaggggtaggcttttatgcattgggcagttcataaaagtatagttttgcaagcagcaagctggagtcatactccagaagtatccagctatgcttacacacaaaacctgtggcttagattctaatgtcaccatctagataagttgaaaaaggtatgttccaaaggccagcctgtctttttcaattatctttatacaattagcaaagtaatggtcacagtaatgacagaggagaattagttctcttaaactaattttgatcaatagagtcaaagtcatctcaacagttcatttccagcgacttggtgtctttttccctgtcctttcctgactgtaaatcacaatgatttgaaagacatagattaggagctgaatgtaagatggagatacttttctccatccctgcccactctatcctgttaaggtgaaacacaaatgctcccattagtaattgagtgaattgaggttgtcatgcagatcaatgtaatacggtttcacaccttgtccattttgagctactaagtgggaactcccaagaagcaactccatggaaggggaatgcaggtgctttgatgctgtgccaaagactgcatttttaaaaaatggggtttgcatggcaaatccaggaagcagactctcttgccatcatttaaaaaaaaaaatctagtatgtagcataacaaaagcaatgcatacttgagccagattcagctcatgttctccagtggcatcttcaatcacaaacttagtcaggcatacaccctactctgaaaggatctaaggagtttactaaccacagttagattgtctttccaacttcttctgtggctgcagctttagaagcctgcaattcatagctacattacaagtttcttctcttctgcaataattcttctaaaatccttcttaaacttgttgaattacgtctaggtgagatctgcttaaggataaagagaaacaccatctgattttaaatacttctcccccggtgaaaagaagtgtttataaaggtctcagtaagaaggttgggagcaataaaaggaagggacactgaaactgacaaggctggtgaacctaaaattagtctctcaggattggttacaaactctgatgggatggcatgtgctggaatactgcttgaaagcacagtgtttgtgtcctgggcttcttcttttgagccaccaaccagcacccaaatcatgacattgagacttcctatttattatgaatgtctggccttagcttaggcttgtttcttgctgcctcttgtaatttaacctgtttctcttcatctacattttaccttgggactttcgacctgttctttctgtaagtccaacttcttcctatttcttctctgtctttctggtgggcagctggctggcttgctggctggcaccaggcatctctttccctttctgcctagttctcctaagttgtttgtttgtttgtttgtttgtttgtttgttgttttatttctcctattattcgctctccctgccagccccacctagccctctcctgcttagctattggccattcagctttttattagagcaatcaggtgccttagacaggcaaggtaaaacagcaacacatcttttcataattaaacagatgcagcataaacaaatataacacgcatttacacagttaaagtcacattccacaacataaacaaatgtaacacatctttatatagttaaatatgccacaatttatgtgtggcaaatcagatgctacctttatgcatttttaactctgaagtctatactgaccctccatggacatttttcatctttactggaaaaattccacaaacttgccaccagatgagttcagaatcatctgcattatgtgaagaatgagaatctgttctgctcaaagtcaactttgaaaaaaaatgtgtgaacagctcaactataattaagagtacagagatagatctgtacttctgacaaattgcttctcaataaagactccacaagtatttagtgaagtaaactaatagcttcaataaatagccctagggcaactgggcaacagaagaaaatgaagctggaagtctatttcacaaaatatgtaaaattaactcaaatggataaactaacttaatatcaaccctgatttttaaaaagccattggaatgaatcctcacagccttgaatgtggcaataatttctttgttatgatacccaaacacacacaaataaaaataataaatttcatttaattaaaaatttaaacttttgtgtatgaaagggagtcattaagaaaatgcaaaaggcagggcattggtggcacatgcctttaatcccaacaccccggaggcagaggcaggtggatctctgtgagttcaaggccagcctggtctacatagcaagtgccaggataggctccaaagctacacaaagacaccctgtcttgataaaccaaaaaaagaaaaaaaggaaaaaagacaatgccaagacaaccctacagagtggtaaaatatttttgcaaatcatttccctgacaaatggaatagtatcccaaatatctaaagaactctcataattcaggaataaaagacaagtcagttagaaacttggaaaagatttaaaaggtatctttcccgagaaagtagacaagtagccaccaaaaacatctcagaagatatttaaactcattcatcatttggaaaataaaaatctaaaacacaggaagatactacttcatgcctattaggatgaatagcattaaaaaatgaaaactatcaagcattgattagaatacatgatcttgaagtctcgagttttgtttgcggggcttttaaaaagtgcatccgttgtgggacacaatcatactatttcataaaaattatagaatatgcccactggtacaatagtggcacaaatatcaaaacaaaaactttctgtttggacttaaagtcctctctacaaaagggaactcatggctggtaccattaactaggctaaattccaatgggcagttaggtcataggctctgtgagacagcataattctattattctgctaaatggacatagtaataactgaccaccaagttcttatctttacaccaaaaaattggtgcattttcaaccttcatgagagaagctcctttttgcagcacacgatgattcatacagaggcctaaaacttgtcaatgtgcagagaatatgaggctctaaataagattgtctttatcacatctcctcctcccaaggctcagggatcatcagaaaaaaggatggaaacactataaaagccagaaatagtggctgtcttcagtgaaacatgacaggcccattgcccatatgatcttgcagcagctttgactaaatgcacaacacatgaacaagatcaaaccagacagaatcccaggatgtggggggggggctcatgaaatcccaccccttgttgaggagttattggcaattaatggctgctaggggcggaaaattaggagaattgctttcctaagggatgtggcccctgagaagtcacccatgctccagtaaatgacctattaccatgcacgtactagtcatactaagtagactcagttgttttattttttctttcagtaaaagcacatgaagagagaacaccaccaccaaatggtcagaaatattcttacacaagtcagcaaaactttatctttgaaagttttgacatatttgaagattctgtagttattaataagccaggaaagaatcatggccaaaagccactggcactttcaccaatcaggcttcagacagttgtcactgaggtttcagagaaaaagatatgagttcctcgtgtttttatcatgtctccccgaagtgtgtttaaagggccctcccctccatataacaagacactctacctgatgagttttagtctaggctctcaacaccctcagaaggaaggctcaggatcaacctgagggggccttcacactgtatgtatcatcctactccttactctttgttaaaggacctgcttgatttttaactatatgtctatgtgtatgtctatgtgactacatgcgcacatgaggacaaatacctacataggccagaagagggatgacatgagatccctggagatggagttataggcagtggttattcactcaacatgaattttgggaactaaactcatgtcctttctaagaatagtacacactcttaccactaagccacctcttcagctctctattccctattctttctattctcgttttatttctttatttcttgatattctacatagccatgactcctcacaatagaaccctgaatgttgagataccagggcctggcaaccctgggctttgatgtgaagtttttccacagaaagcaatccacatggaagctaatatttagcttttggcatttccgaatctggcaaggtgagttcagtctgacaggaggaaacacaaccaaaggctctagtagtctgaaggtttaatagtccaggcaattgggaaatgtgagcttctggaggctcattagagtcatcagaggagtccacattccagcatgttcaggtctcactttgccgttcttcacccttggcctggggaatatgctgtgatgatttcaagaaaagcctcaaattccactcttgatgaaagtggcaatattcattttgaattatatttgcaaaaggctggcagggaaatagaagagggtggaaaaggtgaagtgaagtggtgatgtcattcagagtggagggatttttgcataatagaattttctctttgtagggtattatggagagtgacatttcaaaagagcacacagctccagcagaagtccatcaaaagaggtggagttagacctaggaatgtgatggacaaaactaataatcaaagagcaaagccaaacaattcctacagcgacatctctgtgttgtcttcgagtcctacgggcagagcaggagtccaagtctaatggtcaaaattgtattagcagataaatatctggaaaaattatatatacatgtagcacgaataataaaaacccagagacagatattggggttcaagctgaagacgagagaagcaaagccagccactagagagttctcacctctaccaatgctcagacttataggggcgatccacagaaccacagtctgctcctgactgcaccgctgctcagactcactgagactgcaatgagctcctgtcccctcctgccttatattcctctctccacccagccatttcactcctgtctccacttccctagtactgggattaaaggtgtgagccctgttttactttttgactgattcactctcatgtagcccagggtgaccttgaactcacagagatccatctgcctctgtctcctgagtactgggattaaaggtgtgtaccaccactgcctggcctctatggctatggctagctttgcactctgatctccaggcaagctctattagatcataaacaaattatcaccacatatacatgtgaaaatgcatatgcgcatgtgtgtgtgtgtgtgtgtgtgtgtgtgtatttcaagtctagttcatacaggtgagtggagatactttggttacaaagggcaatgtggaccagagtccaccacagttggcctctttcttccacttataccctgaacatctctgaaatcctgaaggcatgtggaatatattttactaaaccattctagagccacattcttaattttccaagtgagaaacagagacacagaaagattaaactcatgtgtagacctctccgctattctgtactaagataaggtgccagtctgtcagccctgacccttacttccatggcatttatttcctgtcatagtttaaagcccccagcataaccaaatagataaaacaaatactggctatgcaaactagttacttggggtcaagtcccaacaccaccattaactagtgtgatactgaaaaccagtgcccctctctcagctatagagtcctcattggcagtccagagggcttaatgtgaattcacattggatgaccacatcatcagagccattacttctgagtctctttctacttagaagaacaagacttctgttctcttattctttcacttttctcctcacttcccactctaagttgtgattttttaaaattttttatggccacacaattgtggttctgacttgttatattagttagcataagacacactggttgctataataaatacactccaatactttagaggcttgataaaatgcatctagcaaacttacagtctgtctgggtttctactcagcaccaccatccctggacatcatgcattcttctactggattgctataagctacgcagtggtatccaaggctttggactatattccaacaccacttacatgttctagagagacacaatggggctgaatagtaaagctccaatagaaattacattatggccagagagatgcaggcaaccttacaagacacattattggtggccattaagagtgatggcatgaacatatcttgtctaaaggaggcagttttttgaaaacacaactacagagattagaggaacagggtaaacttagtttttccacttacatgtgttcacataataccaagtctcatctgttcagaagataatgcaagtcatgagtgggggaaatgcttcaggaggaaggaccatttgggactgccactcacttttttcttttctatccttctaaccattagttattctttctggacaaactatatatgagcattcttgtttactattgttagaagtttacaaattctaatggtcatgaactctaaggtctttgtgtataaatgtgaccaactattaagaaaacatgacacatttaagttgttcctcatgggtgaattatttctctacacatgatttcagttggttaataagtaaatcctgagcaaacaggtacccccatgctttcctaaggtgatgtaatatagtaatcattctaagcacatgctccatgcatggtcctcaccaacgcaaatgctcctctaaacccatgtgaggtctgtttacatgaacatacgagaagcaacagctggaattgccaaaggccaacaaatccatttggtttggaggtgtgcccatatgtcctactgttgaccacagagccctcatgccatctgcctttcatggggcagctctggttggtgtgtgcaggatggtgccaagccttcacatccacttagtgaaagcaggacatttatgctgtcggctctgattgcttctgtcattcctgccctattcccatgtttgggaattgtctacatacacacttcatctcttccaggagtatcacttcccatttcctcttacaacgtttcccattggttctaagtcaagcttcgtggacaaagctcgttttcaacaataaatagagggttgattttcttttcagtcttgttgagatgtaaccaacatataataaattgcaaatatttaacagacaccatatgctgagattggacatgggcatacacttgcaaatccttgatatcaaggtagtaagtgtaccctcatctccaagaggtcccttatatgtttttatgtgagtgtgtgttaatattgcttccatgaaatctcccatctgacctaaatttgagtgcatgatacagtattgtggcttcctggcactatgctgcatagtagatctccagaactaatttattttgtggaactgaaattcgaaaccagacgagcatccctccatctctccctcctcgcagtctttggtaatcattcttctattctctgctttcttaattttgactatttcaggtttctcagacaagaaaaatcacactgtgctgtcattctatgtctccttactcctcttgatagatcctccaggatcatctaggttattgcaaattgtggggtagcagtcatcttttcagaacagaataatgttctattccacattttctttatctacacatatattgtttacttttatattactgcaacaaaacactatgaccaaggcaacttacaaaagaatgtgtttcatgaggtttatagtttcacagggttatagtccatgatggtgaggcaaaggcatggtggcacaaacaactgagagctcacatccagattcacgaacaggaagtcaagacaatatactgggaaaggccaagtgttttgaaacttcaaagcctacctcctcgtgacacacctcttctctaacaaggccgcacccactaatccttcccaaacagtctcactgacagggacccagcattcaaacattctcattcaagctatcacaatgcatttgtgcaggaacttgtgtacagtttaacaaagattccttaagtattactgctgggctaggagtgctctggcccaacgctatcctaagtgtgttcccacaaggcctgtcttcacatcttgttttaaatcttgacatcagtgaagtgagggtgattctcataatcaggaaatttctaggggcttttcattaaagccatgcctttcaaactggacttttcatcctgtgaacaaactgtagtcctgctccgtgaaactctagaagggatgcagtgtgtttgaagcccattcaactcacacaactcctttcccaagttttttatagaattggtcataaaaggaaaacagagataaaaattctactcatcaaaagacaatcaccataataatgctttaatgatagctctggacccttgtggaagtgagcataacagtgacaaatgattaacagcagcatgtatggtagccatggagacatgccaatcaaaccctcattcaaggaaagacttactgtttagctgcagtgagcaaacagcctccagctattagtatctatagttgccttagctaaaagagccaacttgttggaggatacaccccttctttgcaggctctaccagatagctagaaatgacagggctctaaagagacagccatttggctttaaagtcagaccctcatgagcaaaggcctgtgttctagtcctcacacattccttactgtttgtctctgctttcaccttcatgcctcaggtgaatctcatgcctcaactgaatcatgataagagcgtatgtccaaatccctgaagaatgcaacttgtgagagtttttagtactagaagtgatctgagaaagcaaagacaagatgggccttagaaagtgaccattcacctcacatctagcaacttaggatccattcctaaatggtaatgggaggacagacagctcctggtacacacaggctgtcataactgttaaaactttcatgaaaagtgacttgggatggagaagcagtccaaaggaggcattagtacatgtgacattgaagacatttgagatagaggaaataaaaggaatgaggctaatagaaagtaaaactttttattttgtagaaagatagcaaaaatctaagagtgagtatagatttttaaagtgtcaagaggcctttttggccacagagtaatacttgggaaaatcaagggtagaatccaatcagacaaagttaaacttaacgtgaccaaatgtacaaccacggcaagtaggtaaaccaaggccaaggccttactgggaaaaggtagtctttacaaatgaagtaggaaaactggtgaagatgtcagttcttgcggccttagatgtaagaaaagagccacatggagtttgcaacgagccccatagtgatcacagcataatgcgtcaaagttctggaatgaggctgtgtcatcagcaacaaaggaacatatgccacctgaaaacaccactctgccatgctgccaaagcatggaaggaacagagctgtccatgatgtgttgcattctaacaaatatacagattcataaagtcagataagctcagcaactagggatcataagatagaagcaaacatcataggatgaaggcaaacatggaaatagcaccgaagccaatgtacccatcataccatcatacacaatcatgcttttcccaattcacatttatgtctgaggggtcccttatacccaggtaaaggaaaagggaaacactgaatttggaagacaggtgtgtgtgtgtgtgtgtgtgtgtgtgtgtgtgtgtgtgtgtgtgtgtgtgtgtgtgtgtgtttggtgtttgaatattataacaagagattgtcttaagtggcaatagtgggagaaatcctttccaatgggaagagcctcaggcaatgcacctggctgctcactcttccttttggaacgagaagagacctaagtttaaagcatagatgaactcatatgtgacactaaataggttataaagctgtgcagggatacaaaatggaaagtactagaacattagtacaaaaaaggtgggattcagtcatatggatggacatacagggctggcccataagcatggtgggttttattttgtgcatttattaatatccatcacactaaattatgtagcaaatccttatcaccggccactcagtgatgtaacaaggggacatgagctaacaggatgcaatggcagagatggaaggtattaatgaacacacaacctataagcaaaatcttattaattattcctgcagtaaaatctccaagctttgagagacagaagccatcattgggaccctaatactaagtcattttacaatgatccaaactagccacttggtggaaagttgcatgcattagagccttcattcaagaaagatcaatagtcttttcctcactgaaacagacacttacccatgtatgagtttgcctttcatgtccataggacatctctaacttactttcactaaggagtgagccatccattgtcctggtatctcacaaagaatcaagactcacttcacaacaaatgagtgtagaagaagagctgtgactttaggactcactgacattcttataaaccaccacatgcttaaatagtagtgtgatcaaggattagagccacagggcctgaagggtaaaggagataagcaaacattgtggctccgaaccaactgtagtagcagtgtagactagttcataccactggacactctttttgaatttacattcaaggcgacagttttctaatttccattcacaaagcctcgttaagttgctctttgattacataaggagttcatctgtatggcacaatggtgggcagagttgcatggcccactactttaaggatgtatttactcactggctggaaccattagcagaaagcctgaagccatcagctctttcatgacaggctccagcaaggtacagctgaagtcatgcccttccggtacaccaacatgtgatgactcatctcgggaatagcagaaaggcaggcccagcctgcttcaatatgaaatactctagtggggcaaccactgggtgggctaaagggtccctcgggatggcctccaatgttctttctctgtctcaacctgttttctcccctagcaaacatattctatgtccacttctcagtgtctgcttccaaagaacaagagctatagcagcacagaagcagtggtgccaggtgatatgatatccctacttatgtgagctaataatttcttgaaatagggtctcactacatttgtagccctcattggtcttgcagtctcaatgtagaccaagctggccttgaattcagagatttgcctgcctcaggctcactagtgcttggattaaaagcttataacactacccctactgaccactggctaatatttttgctacatactttatattcattagctgccgtgctttggcctcttaagctatctataggattgtaatgataccatcctcactttatagataaaggaactgcagacacaagttgtttacatataaacttacaattttaggaatccagagccccatgtacttgatcactacatatatgaaacattgaaattgatgggcatgagggtgtatgcctataaccccagaagttgggaggctatggaatagttgtgagtttaaatcaagccttgttttcataccaagaccttgtctaagaaagtaagcaataaaataaaataatttaagataagttatcttgaagattgttgtgagctgtgagacattatccaaacagtggtcagtccccttgcaagaaggcgatagaagaatgccacatggcacttaagagcacagtatttactcaaacagcattttcagtaaagcaagagtgaaagaatcccttctctagaaggctaagttatagaaatggggagaatcgtggcccaaattaggtagaattgtggccaaaattctctgaccttttatgaaactaattatatagagaaagagagagtagattctaactagaaggaagggtggcacagagggtatatatctatggcatgtaggctttgtgctatgtgtactgtgtaacttaacattctcatgatgctgtgtcataagagtgaacatcggccacgtggatttggctactcattgtccttctattaagaaacagaaacaagactctcctgtggggaatttgtctttcttcattcttaaccatgaattttaaacataatggccctattaccatttccagcgtgtttctttgatttcctcacgcataaaaagtcatgtatctactctctttattaatgctgttataactgacataatcaaataccacagacagtgttacttaaataacacaaacttggtttgttgtttttttctcataattctgaagactagaaatacataataaaaatgttggcagttttgtttcttccaaggcctgtcttcttggctgtcttttcctctgtgtcttcataaaccctttccatgtttttcctaaattccacttctcataaggacacgggtcacactgaattagggtccacccatatgacctcattttaattggattacctcattaatagtccatttctaaatacccatgtgtggaaatctagggcttcaacatgagaatttgagagaggacacaatccagtccataacatgacctttgcgcatagtaagtggttccgagatgagatagtgttccagttagagtgtagaagactcaaagaagtagacattcagactctgggagggaagagactccaccctctattgacccagggaatgctaaaatggggagctttgtgttccagaggtcatttttattccacaaagaaagccaactcaaggcaccacatagaggaagcagaccagaagactcaaactcaacttgactatatggcttgaacttctggaccccctaaacttaaaagatatttgagtccataaatttctctccagtctaagcatcttggttttgacttttgtcatttgcaacatcaaaattcctaacccatctctgctcttcagagtcacttgggtaagtactggtcctcatatctatgcatggtgaatgctaacattcttgtgttacctgctgtaacacacatattattctctttcttaagagagactcaagatggccaagtcaatcaaagctacaacctaaaatctacagtaacagactatttatattgctgtgactggctgttttgccatgacaaaatagctccccaaaacaacttaagggaaacaaggtttacttcatctcaccatttaagcatactgtccatcatggcagtgagagcatgaggcagctggtcatgctataagccatcagatccagacatatgaatgcatgtcctcaagattttgttatttgattctgtccagaatcccagcccctgtgatggtgctgcccactttctgggtggatttttctagaaatgtctcacaagtcacagtgattctaaaccctggcagttgacagtagaaatcaatcatcacacttggccttccagaaagtcactttccatagcacctaccaaatccaggcagaatgaggctgttcttacatgcacagccaattcttctctgtttgaaacccacaaagataagagagggtttcagaaataccacccatctaggttaaacttcccaaaggcaccagaaacctgacatttcccggagacagtgattacaaaagggcaatgattctgctggcattttccaattcaattgagttcagtgacatctttactgtgcggggcactctactgtgtgagggaaggaactgagcataaacagaacacactctgctatgcttaccatatgaaaaactgtaactaaccaagcacaaaaagaaagaaccaggattgggatttctgtggcttgtaagtaagtgtctctgttcagagatgcttggaaagacactgccccacattgtggttgctgtcatctttggacaccaaagcacacaccattgagcagaatccattgaactccaaagtctattacaaagacacagtactttgccatatgttcaccacaaactaaaaattctttttaccacaatttgcaatgaaaaaaacatatggaaaaaagcatagaaccacatgggaatctcattattacccctctctttaacaatggaaaaaaaataatgctgtagccataataaggatgtagttcaatgaaacagcacagaaagttggagaattaggaacatctaagtttgttttggacagttgtttttcaacaataacatgtttgtcttcttcagttaatcagattacgtggtttataaattaaagagactacttggcattccccttttcatttttaaaaatcctgtccttattatgtgatctgaagactgaggattcataaccaacaattatgtgtaaagggacctaggagaaaagctaataggaatctaaagtgcttggcagttttaccgtggtgttgaccaaaggcttctgtcaattattgctcttattgttttaattataatcagactcttaattgaatagtattctgggcaaattattaagtactatgagaattgtaaaaattgcttgaacatctccttctattacaaacttacagtctgcagaaaacctcatcatttcaagactgattcactgaatcgtcatgggggctggggataattttcctgcttcttctctaattggtataacaaacactacacccagacagaaattatcttcattgaagttgctccatcaaatggataaactatgcttggtttattcccagtcagctatagtactaggtctgggccttcagtagagcagtacctgagtggggctagagctaagggatcactagccctctataggaagtatgtgttctcagcacagtggtaacatgccaccgcactgtgctatagcaaagtgaatgtgtatttcgaaaccctcccctctatggtcccaagagtaatccttgaggggggaactctgaggaggccccactggacttcttttacatccaaacttttttctcttatttcttgcctggttctttttgttgtacacccagcagactgcacagtgatcaccaatgacaggtattatggtcccaggctaacaacctgcattttcaaacaatctaattctcttcagataaagcaatgaactccatttaaaggtagcatttctccaagtcacatactaaatgatgcctttgataactaactaacattcagaaaatggtttttcccttaaagcaatgagacttaaaatggtctttccctcctacagctgtcccagctgcgtcactgtggcttacgtatatacagttatgtgtgtgggactgatatctatttgtttctggtgagataaaacacttcatatcagcacttcgactgaactaggaacaaaaacaaacatccaacttaggttctatggttcatttagcagtttaataatttatttattaccaattacattgaccacattcatgccttaaaattttaaagtttgtgtgtgtgtgtgtgtgtgtgtgtgtgtgtgtgtgtgtgtgtgtgtgtgtgtgtgtgtgtgttgtatgttacagcatgcatgtggaagacaacaacctgagggagtcagttccatgtgggtcctaggagttgaacctgaggcaaaagcctctacctactgagccaacaatatatacttaggaagaatccatgctgggaactatagagtaataaaatagtccttctcttgagagttctaaaataagttgcatactatatagtctggacttcacagaaactcatgatagtctgaaaaatatgtactgaggagtttttgaattccgaagcacatgaatcccataatttctatcattaaaatataatcaagcaatttaagtgacactggaagacataaaatgattttctacattatttataatatagatctccctcctccctctctctctctctctctctctctctctctctctctctctctctctctctcatgtgtgtgtgtgtgtgtgatttttaattccatttctagataagaacaatcacttccattaccagaaccagcaacatattttacaaaaagggaaatttcatgctacaaatactacactcaacaaagaacagaacagaaaatgagctgtaagttggactggggtataacaaaacatgtacttcattgtgtaagcctgcctctgagttttggaacagaatttctcaacctgtcaatcatgacctctttggcaaacctctatcttcaaaactttacattatgattcaaaacagtagcaaaattacagttgagaagcagtagtctggaaagtcaaaagaagagctgggtccagttttaaatggttgtacatcaagaacctcttgaaagactcaaaagttattgaaactataaacaataaacccatgaatgctgaatattaagtctttacacttaaagttggtggtagaacaaatcaaaatcacttactttaaatatttagaagtaatacttgagaaaaaaattttggtaagtttgagccaaagcatagatactcttacataaacagacaaaaaatattgtttgtagccatgaaactcccttctcagatttcctatgactggggtctctacatggaaacccactactggatttaggacaggcaataggccctattgtgtatattcagtcagtgactcagttaggcaggaaaaactagggcaggctcagacttggaaaacgagggattcagactctgacagaagaaataaaatataatgtaaaacacatcttctttccttgctcccccacctctttcccctcctctccctttaattcttccctcctgcctttcctcacctcctcccttcctccctccctccatccctttctcttctcacctggagcaacactgacagccttcccagcctcctatctctgcttcccaattttccttcagaacaaacctgctacatgtgtaatcccttcacagcagttctgctctggatgcttggatgaattcatctatattccaggctgtttggggaatttggaggtttgggattattacagctgtagtactatatggtataaaatgatactggtcatattagtgtctgtggtcaaagataacaattcttataaatggtatgaaataatcctttcaaattaacatttttaaacctcctacttttcagtaaccatgcagataaagtatgttaaaatttaaacaaacttcaaccataactccatttagatatgagcatcatgtaatttttctcggttttaatacatgctgagttttacaggaatgcaactactttgcaaaacaaaacaattatctttatgtcactgtgtatttgccaagagtggctccctgggtcagtaaagctacattacacaacaatccacttgtgacacttgagtactcaaactaaagctctgactcagactgtatttgcagctgagagtccattatttttataggaagaactgtgtcttccagtttatttgcatctaaaattgtacttgtccaaacacataatatatattttaagtaccttccccatattttataggctttgcattgtattgtaactgaaacaatattcacctccatggatgtaggcacaagtatatatttaacatacatacttccatttcatggcagaagaggggaaagtaaaacaaataaaccatgaagagaaaaaaccaagagacatttagtacttggagtaagagaaaagcaaagtgattgtccgaaggagaaccataaaaatattttggcaagaatggatgtttttccatgtctacagttttcaccgtgttcaactgagctcctctcacaatcttcccttgatgagtgcgttcttctttgtagaagccctggttaactccctgcaactgcatttcagaacctggaaggagatagctaatgatctaggggcacctgggacattggagtagcacagtgctcttttggctacaggatccaaagctgtcaagcttcctccaagactctgggcagctatgtacacatgtagacatggccacaggatctaggtagttcagagatggatacaaaacctgaacaggaggcctggaaccaatcagctttccagaacccaatcagggctcccactttctcagagccagatagctgccattgctggatgttaccttagtctcatttaaacctagttctttggatcaccagtttctggagtctgcattgtgtctgaaaagtgaagtaacattttgagctagtagctattacccgaacagaagaatttcttacaagataaacagaatgctttatatataattcaatccttttggttttccaataaacatttataaagtggtggccccaggagggtgctataccattctaggctttttttgttgttgcttttttgtttttggttttggtttttttttttttttttttcaagacaaggtttctctgtgtaacagctctggctgtcctgaaactcactctgtagtccaggctggcctagaacacacagagatccctctgcctctgcctccccagtactaggagtaaagacatgtgtcaccacccaccacatggccattttaggcattttataatcagggaaccaaatgaaggaaagatttgtttcctttttccctccatttttaatttaaattagaaacaagatagttttacatgtcgatcccatttccctctcccttccatgcccccccaataccctacctatctcataccctttctgatccccagggagggtaaggcctttcatgggggatcctcaaagtctgtatcctcccctgtgtgtctaggctaagggagtatacctctgtgtgggatgggctcccaaagtccattactgtgctggggataagtactgatttactacaagaggccccatagatttccgagtcctcctcactgacacccacattcacagggtctggattagtcctatgctagtttcccagctatcagtctggggaccatgagttcccccttgttcaggtcagctgtttctgtgggttttaccagcctggtcttgactgctcatcactcctccctctctgcaactggattccagttgaattcagtgtttagctgtgggtgtctgcttctacttccatcagctgctggatgaaggccctaagatggtatataagttagtcatcaatctcattatcaggagaggtcatttaaggtagccttaatttcttagattattagtttgtgtcattcttgtagatctctagacatttccctagtgcctgattttactttaaacctataaaggctccctctattatggtatcttttaccttgctttcctctattcttcccccaaatcatgtcctcatgtcttcctcacccctcctcttctccccttatcattctcctagctccctctcaccttcccccatgctcaaaatttgcccaggagttcttgtccctttctccttcttcaggggaccatgtatgtctctcttatcttctctggcagggtggattgtaggctggtaatcctttgctctacttttggcataccacttagtaaagtcaaaccaaatgaacttttaccacgggaggtcttatattgttatgggcaaaattagcacccctcatcctcttcgaattgatgttaattcttcacagactgcctctagtgcactttcttcccagtgactttcagagtgagccccaacttaatgagaaggaggcatcttccgccttcatttctacctggaggccctttctttttcagcatccctaaagtttacttttgctctgttgcaacatttgctaccaagaactagtttcctgtctgtcactctcccaacaaagagcctataaattagtcagtgatttattctggtggctattcatcatttttattaacaacacaattggaattgtatgaaattaggctataatggttcttgcctttctatgtaattagcattattatatcaataaacaagcatcacaattgcctaagtgctctgtgctttgaggaatgtcttataattaagactctgctccttttattcccctggagcctagtggaaataatgatttgtatacacatcatactctggcaaacgcagaggctcatggggtctctgagtagagttcttccatccttcctgcaggttcacatgtttcttctctgttgctcacaacagacatctacatcttaaggggtttatgaagcagtgtgttacctaagcatgctattagctctgtataagaaagggcagcatctcctgtaatacattaccgtattttacaaagaagacaactgagcagtggtacagttttaaacatctgggcacaaaatggaagagttcagacaatattttccttagttaacaatcaactcctcctccatatcgagcttgccaaaaggagaaaagcacagatttagatttacgattctcatcaaatacattctaagcataaggaggttcccttcatagtgacaacctttgccgaaagaaatctataactcaaacaggagaaggaaagaagcaaacatgggatgtcttctgtgctccagtcactgatagtgtgaacatcttagggattaggaaactgaactcactgttgggagtaatattcccatggttgtcatctagcaagtaacaatgtaaatctctatggtctacactttttctaccaatgtcttgaaatcagaagttcaatgcatattttgaaaaaaaacaatgattatattaaaaattaatgttgtaagcacttattacataccaggtatcaggaccaaacttttttttacataaattgatccaaatctaatagcaattgttggcatgtttcttaatctgtatacgggtattaggaagaaaaaggactgcatttccctgttctcattctctctctctctctctctctctctctctctctctctctctgtgtgtgtgtatatatatatatttgcatatgcatgtgtgatatgtataccatactatccttcagtgtcactgagaggtagatgagtagggaggccatgttccttggctcacacaggtaggaaggcaagaggaaaaaaatcagaactagaacttcaggatccagcactagatctatttaacctctgggaaatcaggggtgtggtggggaaggggacagtgagttcacaggagaggatgtactccttgaaatggggttgcctttggagtcacacacagtgaattttagatggttgcatacaaaactcagtaatagttggtgttggagtctatgctcttgtgtcatggtgaaagtagtctaacctgattaccactcttttggagactggctcatcataagttttggttacttgttgtcccctactgctcatctgcaagtaataaacctatttaatataacttgttgtgtatgagtgtgctgtctcacctgactcaggcaaggagaaaaaaggcccagcctaagaagttgtgggctgcattggtaaccagcacatggggacctgcctcaccactgccatacttcaatgttttcaaacagtggaagtttatttcttgccaatagcatatgcttcttgaaaacagagtggtttggactctgttttaacattccttgttccaggacacaggctgacaaagattctactcaattcattttccataatcactgccacagaaggtacctcagtgtctcaaccaggcaattaaacatttctacccagggatgccacaccacttcacctccaatcctgttggttaaagtaagtctatagccattctcaaatttaggaaagtagaaaaatgtaaacctaccatgtgtttggaatgacaaagaactaaaatgacagtggatattcccagtgactagcatgtgctgcattacactccccaagagcagttatttggagtagattttctattctacatgctaattctacatcattggtaatcctgagtactttgttatctaagatctgtgttcttgctgttttgttgcttttgtgtaatacattaatctctgctctaataaactgtaactagtcaagcaagaccatatgcattatagataagctataataacaaaaaacatagcaggaaacattaaaaaaaaaaaacaagtaggtccacttatgcagtgcccatggaagactgtatgagaaagtgatcatggtccttcttcatcttatgaagtacattaaggcaacattgcctgccccacaaagtgtttcttacctaaccatcccacttgaacatcacaattttgaattgatttgaaaattaagagactgatgattgtattagttacctttcttattgccatgacaaaattactgacaaaagctattaaaggaacagcaggctgattgaagctcacatttttttgagtacagtccatctagcaaggaatacaggatgctgagaatggacatagttacggcagcaggactgtgatgcagctcatcatgtagcatgtgctatcaggaaacatggacatgaggaattcaactcactatctccttagtctttcattcagtacagacttctgcccacagtaggtgttaccagcagtcagagtgagtcttccctcctcatttgaacttttctagaaattctcttgaagacacattcaaagtgtgtcccctggatgaatctaaatccacccaaggtgccaaagaagattaatcatcacaagtccatcctttgttgacttggtacccaagaataccagttttaaattccaccctgatcctcaaaagctcatgaatatcccataatgaaaaattcatttagtcctcctctaagagttctgcagtcttagatttaatattgtgacaaagcccgacattgtaggggaagctgtagccacgccttcttaggggctggctacaggtgtgtctgaccaggcttgtgagggcgtggtcagagtgtgactgcatttgtggttttggtttctctttggtacaggctgctgaccggctggctaggtcgctctctaagtaaggcttttccctattaaatacccttatatttctacctgactccgtattggtaatttcccactatacgacatcaaaagcttcttctgagagttctgagattcaagtcactataaaataagattccagtcctacacttagctgaggagaaatcagcaatgaatcattactaagggagggagagccaatattctttatgggtgtgccctctcatagatggatcatactacaacagataccacatacccaagagtatatgagcaatagaagctgtactggattggttaaaaagatagagagaatatacaaaatgtgagggtagggaaagggggtttggcctggaaggaattgggggtgaatatgatcaaaacacattgtttgaagttaccaactttaaaaaaaaaaaaaagatacagtgttctgcctacatgtgtccctgaaggtcagaagagggagccagatttcattacaagtggttgcaagccaccatgtgattgctgggaattgaactcaggacctctgaaagagcagtcagtgctcttaacctctgaaccatcttgccaaccctgaagttatatattttcaatacatagtagtacagagtaaacacatggaggaatgtaaagatagcaaggaaagattagaccaaagtaagtccagtgggatgtcacttcccagacttgggaagtccggcccttcccgttctactacccgaaatacatagaccctctcccctgtcttacaaatgtactataagggcctagagagatggctcagtggttaagagttttcaatgcttttccagaggatcagagagcagttacccagaattcacaaaaagaggagcacaaccactataactcaagccctagggaatccaacaccctcttctgggctccataaggcactcacacacaacaaacactcatacagacatagacataatcgtgaataaaaacaaaattaaatctcaagagaaccaaatgtgctgtaatgacacatgtgacatctccgacatccttgggcctattatagtttaagttttatcttaataggtttatggacttgcctttcaaggttcctggcagggaatacagtcactctatatattgcctgactttagaagctttctagagccttgataaagtctccattgacctgttagcgcatacattttgcaggcactaaaaaagaatactaggcaaacaatgttaaattctgctgtcagtgtgagatgcagtctgggtctcttctaccacagttacagtggtagctggacatctttgtggccaaacctgggaaaacagaattacttttttaacagagacccctttcagcagcattctcaattcaggctctctcctaccaaatgaatttttactttcccaagttggagcccagggtatagcccatcagtggagcagaaaggcatggtgctgagaccacctctgattgcagtggcaggagcatgacataactgagtgcatcacatcccaatcaggagacacagaaagatgaaggctggtgctaagctcccttcctgctttttcctcctttattcagagcatggccttcaccctttggatcatgctgcccatattcaggatagatcttcaattctcagctaaacttctctgaaaatatctacacagacaaacccagtgctgtgtctcttagatgactctaagtccagtcaaactgacattgaaaattatcacaatgaccatgagcataacactagtaatgacagtacttaaaatgtatccaggtcccacaatgtgacacccactttatccagatctcatgtgaattttccaaagtcatggttgggtaaagagagataagaaccaagtaattcggttctctttcctttgtgatactctagacagtactgtgttctgttttttgtggaaacaattaattctaaattattgtctaaaacatgcatgtggctttctttagagataccttgactgtgtaacattctcacctactcatgcccacacattctttacactgatatttggctaaatcgggcacagcataactctactagcctaggacattacattcccaaaggaagtattcttcctacctttgggaatgtaacaggattcggttttcttctttcctcagtacagacattgggtgctatcatgattgctcagtaaatgttcttcctttcttcagatgttcagtccatctaatacccattcactgaattcacaacttccaacattagccaacataagcaaaatcccatcttcttttggcactgtgagtcaaaaatttgtggatcacccaatccaagataactagttaatggccttcaaatggacatggaaattaatgagatcactgtggaggccagaactacagatggaagagaagctcacagtatttctcaatcaataaattgacttacccatataccaagaaagaatctggcttgagattgatatcctacccaccaaaatgggataatcacaaaattatgtccagaacatgggtcaaacaacactcaaagctcatgataattggggactttggaatcacatgactcaatgagttccttttgatttttaggtcagtttaaacctccctagtcaggggattataataataacaataatgaaacagcgatcttgaagttgggagagagacaagttggtgggtcccaggaaaagttggagggaggtatacgggatgattagatcaaaatgattgtatacataaaggacactttttttgttttttgagacagggtttctctgtgtagctttggagcctatcctggcactcgctctggagaccaggctggcctcaaactcacagagatccgcctgcctctgcctccggagtgctgggattaaaggtgtgcaccaccaacgcccagctcataagggacatttttaaagaataaatttaaaaattattttaaagaataaacatctctgcaattaaaaaccaactaattaaccacagtctcacattttagcattgtcaacacctgtttcactgtatcacacataccttggccttttacagatttccaaaatggacctgcttatttcagcattttttaggtttacaacgttaaagaaaacttgaacttgagcagcaaaaacagtagccatctatctctgtgttgatctttaccattttgttgaatctctctcccctcgcccctttcttcttgtcttctgcttggctctcccatttcctatcctaaatccaagatctttaccatgccctgtgaagtcatataaacacttagtgtcttagtgtctctgttttttattcccacaattttcaacccctgacatcagggtttccttgtttgtcctacaaaacaatgccaaatatcaccttatctcaaacatttgcattgttgtttcattgtctgtaatattattttcccagatagaaaatacatagctttctatagaagccattgaaggccagctgaaactattatctcatctgaaaacactacccaggtgatgtaaaataataattctcctccttgattttctttacaaaaatttacctataccatatgaggctttctttcttctctctgctatctatagaatataaactttaacaacatggagacagttcagctcagctaaatacagaatttctagcagtgtctagcagagttgctactaaaaagtgcccaacaattttaaggaagaaccatttacttgcttctatattccatgaactacctgtgaataactattaccaaataatgttttgcttttttgtgttctccataaactagtgaggagatgtctatatttatcacaaaacgtccacaaaatcatatacggttgctgcatatggttgtagacttccattgtcttggagttcatatacagactatcctgcaatgtataagatcagagaatgtgtctttgctagagagttctagacaaggtgtgtccttaaaatacatctggatcaggtagcccacctctgaagatagctccactactcaaaagctctgtctacgtggtctgaagctccaagtgctatttcatcatttgattttgttcgcgttcaggtgtaataaatgactgtccaaaatgagtatggtattcagtctgtgcagttagagcccatctcaagttgctcattaggtagcatattccatgacaatatgcttgctatgggcatggcttgagatatcttcagataacaagctatctttcaagagaggggtggtgttcattacaaagatgttgaacagttggctgaggcatgtagctttctcagagaggatggagtgtaagacctcaggaaaatgatgacagaattttctgggagtgaaaacagtcctagacaacaaagttcaccccagtagtggaagagaagacaacaaagcagtaatgagatgactgagctcctcattaaataattctgttacttggagactattacttgactaatcagggcttcagtttcttcatttattcaataactagattggagaaaatggtaatgaatatcctttgaactccactctcctttgatctgaccttgcattttggtcttgggcaagcaaatacaaaatactaaccatattaactattatggcatcaaccccctattgctctaggggaagatatcagaacatgagtacaagaaagcactgctgatactgaattgaaagacacaaggaaaacatgggagagaaaagtttagtccaccttccctagatgagaatgtagtaagcaggcctccttacatgaaaagtaaaataagagctaaagagtttaattagctttatagcagactacaaagagctagagagttgccttagaacaggtctgactgattaagccaacacaaacgagttgagccataccttgatcttaacttcagagctggtgctgtaacactggaggttagagagcagagaaagacaccattctaactcctatataccatttgaaggtgttgctttagcaacaaggtggaatgcatgttctacagccaaaaagggggcacccatagagaaagctgctcttgatggcttttaagtcatgaacctctgtcatgactctatgttcatcctatgagtaaacacaagacacagcacctactcttacatgttaggtggggcagccacctaactgatgtctgcttgacatgatggctttatggaaacacacatacaatgttgtatgctgatttcttgggtttaacttactgaagtcttagctccaaatacgaacaaaagtttcttacacccagataagaataatggagaaagtgtgacagggcaaaggctgtcaagatacttgggttataggaggtgcaaaaccactgactggatacccagagctgactagctgtgggttacattacagttcttgacagcctgtagtatcagtggcagggaactcatagttcaagactatatgggcatttcgggagggcctcttttagctccgttagacctcgtgtccctgacctacactgagcagcgtttaatgtgtgcacatttacagaagcacgtgtgaaggctgatgggaacattccaaccattcgacactctggctggactgtctcattgtttcctcaaggggacactcaggaaaggggtgctctaagtagcagccaatacattttcctcattttctacatctcttccagttcacctccttgacattttggaagtagctttcaattatttacgagggactcttgtaaaggctttgatttgtttgtattctcattcactgtattacatttctccaaatgcacagttcgctgctactgtgtctctttaccatctctttacctcctcaaagttacagatatagcatccataggaacttacaaatttcctgatcttttttaaaagatatgcatttctagtttcaattatgtagatgggtgtgaggacttgtgcatgtgacattgtccacagagcccagaggcatttgataccttataattggagatgcccaacattggtactgggagccaacctttgtccattgcaagagcaatacaagctcttaacctctgagtcctcactccagtaccagcttccttgattttattgatcatttctaggactgtgaatatttcctatgggtgaatatataaggtgtcctgaagtctccatgtcatatatctccccaagtatcccttagataagtatgatcaactgctcccaattaaatgacactagacctctgagatgcttttgacttgtttctatgatactttgtttatatacattttgtcatctggtcattttttaaaaactgtttgctttcttcatttatccctacatccgtaagttagggcttatttttcataaataatacatcataagaaaattatgcatataccatatcacatttttatcatgtataaaatttccagagatttttgttaaaaatactaatgcctaaatcctataaagtttatgactatgtaatatgagatggggccgagaatatacaaggtgccactgtttctattccatgcagtcccacaggcaagcttttcagagtcaccaaagccctgctccatcccatagtatcatgcataatatacataacaacacaaatacaacaaacacacatttaaacatatattcaccaaggaagaagactccatggaaagcaattgtggtaaagttaaatgcaccgaaggtcacaaggtggtgatgaatgagaggcccctcaaagaactgactcactgaagacagcaaatgcaaactgtgtcaaaatgaggaggctttgtgacatggaaaagataactcaaagagaattttaggaactatcctcattgagtgaaggaaaatcttagagaaacacaaatgaattcaacttccccactacaacacccagatgggtagaagaatcaaaactacagctgagccgcagaatgatttccttagttggtgagtaggccagaaattaagggactgtctttcttgtggagccctccctaattaggttataagaaggccaggactctctgacagaacggaagtatagcagggaaggtttctacacacatggaaaatgaggatcaaattttgccccagatgtaagattctgggtccagaagataacaaaggaataaaaatgatttccatttacaaaatgccatcgttggtttctatgttgtttaaacaaaaaggtctgtctattctgaattaacttcaaatctctttggtaaaattacagaaaacaatttcctagaacataatggatttaattgcagaaggctaaactcactgtgggcagaaatcaggttcacaagtggagttggcattccttgttgtccaaaggttgaatgtgaactcctgtgggcatctcattctgctacaaaccccagcctcgcatcatgtgtcacccattctagctccacatatatctgtcatcagtgagagtgatagcaatccttgttaggtgctatgttgggaaaggaaacaaagaactaggtgtgagcctcatgctaacagggaaaaatctcttggtaacatcagagttgaccgataataaggattatacattgaaattcatccttagtaacttctgatttagaagaaaactcacaggctacccatagaaactgtcttagtagaacaaagactagggggaaatgctgccatttctgactggatttatgttagcactaacaaaaaattataaaacatttactaagagtatgagccttatactttctcttgagggcccagctgtcttaagcaccatgtgcatttgtttgcttgttcacacctcttgttcttaagtcctgtttgatttacacagttgtccaggatctttaattttgtggttttttaaaaaagacatacaacatatattacaaagtatataacttgagagtatttatcatattcacaatgttatctgacaattatgaatttataaattcacattcaactctaaaacatcctaacaccccaaatggaagcctcatacccactaagtggtgttagtccaccttgttactccaccaataacatgctgcctgcctggatatttcagataaatataatcagaaactttgttttttattatcaccctgttttctttccatatttgagggtgcatgtgtgtatacatgtttgtatctgcatacacaagtctgtgtggaggccaaatgtcactatctgttatctccctttattgctctccactttttttggagacatggtctatgggtgatctgaagctcactgatcctgctaaatatgttgccctggggatcatcttccctaagcccccaatgctggggttacatgccgagctttatgttggtgatgggaatttgaacacaggttcttatgtttaagcaacacccatttgaccatctatgtcctctcctcagcaccagtgttattttggatgaccatccatgccataacccctatggaaatcttattcccttttatggctgataggctattatgtgaacctcatcctttagctcttggacattggatcaagttccttattttggctaatttaaatattcttggcataaacatttgtgtgcatgttattgagtgcatgcttggttcaagttgaagagcatataacctgggatggaattggtggttgtaggatactcacatagttaagcttcaaagaactcccaaactattttcctcagaaacttagcaattttatattagtaccagcaatgtgccagggttaaaaattcatgtcctcacctacactatttttcatttttattctagacatgagaacacagagttatattatatctctttgtgcttttgatctgactcatgatgctggcatctatccatgggtttgttggaaatttgtatacatcctttggcaaaacacctacccaagcactttgtatatttttattggcctgtcttttgttattgagttacaagatatgtttaagtttcttatgtattagccttttacaaaaatatataaattataatttttttcgttttgtaattatctcatcattttgttttgttctaaatttgtgagtcagggttttatgtaatccagatttctcttctattgcatgcttggttcaagttgaagagcatataacttgggatggaattgttcgtgtataactaaggatttggggggaaatgcagacaaattatataaacttaataattttgcatacttaggttgatttacatagttgccttttaaaggcaactatacacaaccatgccaaattcatttaattttttgttactgtctttttaaataaaaaggatatcttaattttaatgaagtcctatctatctaagctttcttttatggcttatacttcatattcaaattcaacaacctattattaattttaaaattaaaatatttttaaaatatgaagaaccccattgtcaatcccgatgtcttgaagatttatccctgttttataagttctctgatttaagaactttgggacattttgaatgaggaaggccctcctgtacaggctcctgtatttgaccacttgttcctcagttggtggcactatttaaggttatggagctttagaaggtgtaaccctgctgaagggatgatgtcactgtgggagtgctttaatagtttacaacctcatccctcttccagttttctctctcattatttgtggttgagatgtgaccagtctcttgctccttctgcttgttgtcatgcctccccattccacagactcttactcctctggaatgacaagccaaaataagctctttcatctgcaactggatcatggtattttttcacaacagaagagtaataaggtcttatatttagggtttttaaaatctgattggggccgggcattggtagtgcacgcctttaatcccagcactcgggaggtaggcggatctctgtgagttccaggccagcctggtctccagagcaagtgccaggataggctccaaagctacacagagaaaccccgtctcgaaaaaacaaacaaaaaaatccaattgggttctctctgcatgtggtatgaagatggattacaaggaacctgtgaacatgctcccccgagactccaggaagcagtgagcatgctaggcggagatttgaagaagctatggtcatgctaggctgcgacttttcagcaggtcagttctatggtcctgcaatcatttcctcgctcatattcctgttaataagctgaataaactcagggattcactctgttagactgggcagaattgtgagcttcatctactattggtgtcccatctgaaggaagtagccgtgtgttcacagctccccaggaaaacattcacgccatgcctagtaatggtaatgtgtctctgtcaatgaatttgtatcaatattttactaactctgtatagggaatttccattaaaggaattggggagaaaggaacataaagcattgtattgttttcataactttctatgagtctataattatttaaaaataaaatttaaaacagaagttccaatgtcaaaatttacaaatattctatatacagaatgactgaagaattttgtttagtgaaactaatgaccaattcaacttaaatgtgatctagtggaagtactgtctttcatgtgccactccataccaactccctcactatacttctctcccatttaaaaacaagatgattacataaatattcagcattttgaaaggcagctatgtcaatcaaccgaagtatacccagctattaaatttcatttgcaatttgtctgcatttctctaaaaatccttatgaaagctatagtcaaaatggtcagtggatcttaaaagaagcctttgtttttgcctttattaacttcgttttaagcaaagcctaaaagctagctggtaataaaatttatgcccctgtgtaattaagagggaactgagtagattaaaccacgagtagcactgagatttaattttgaagtttggtaactgtattctggagtatttctcgggctgtgtcagtggcagagcactgttctaacagacatgacaccctggagtcaatcttcagttctagaaaaagggcacagagagtccagacttgtgggaaatatttgattgagccaatactgtacttttataaattatattctgagacagaattgaatgaaataaggagagcatatattttacagtgtgcagttttggaaaacaggagaatggctaaatacaatgttttgattatattttaataaaatctattaaagcagggtacactgaactgaagtaataggacactagctatgaacatatttggaatgaaatatttatgtgtagtataagaaataaaataacaggaaccattttatttaataacatttgctctgagcatccacaaaggaaaaaaatctattaaaagtattatggcttctacaatagacaatgaaagtatcaaaaattccaaagtaaacaactgcaagttttgaagactttaagctacttttaaaaagttatatggccatactaaataaagcattcttcatgggatatatcagtggtgtggttttagaaaaacacaaccagttaaaaagaactgatcaaagtctcagaataaaaccagtaacaattattttgcatgctattttatacattctttttttaaatgtccagtttgtaagtaggcaagttttattattgttttattgtggctttgagatgtaacttctcatccctgatagaagccggggttagtttaattctgcaagggaataggaaactctgcttaggaagtgactccaaaagttagcagtgaggtagagaggtgtccgggatggggtggggtgggagactgggggtggagaagggagagagcagataatgaaatccagccaggaaaggggcagttgccaaatattggtattaaaagatctcaattctttcttgtcaatgacagtctttagtatttggcctttgggcaaatcatttggtttctcagagcttcagtttctctgtatgttatatgtggatagtggagataggccttcagggaggagtatatgagtgtttgtaaaactgtggagtaatatggagtgtggtgacactaaggacagcacctgaaacagaagcccttcaagaattaaaggaggagagtttgaatgactgttggctactggaggacaaaagacaaaaaacaaaagacaaaaaacaaaaaaacaaataaaagccttagataggtaaacagttcaggattcaagcccagcatccctgtgtatctgctcacattcagtttttctggtctttcttatctctccattactcacttctcagtggcttctcaccccaagattataaattactggacactcccatatgttatgacacttgattgcccctcctctgccccatgacaattgcctggcatggggaaacagacccacaactatgattctgaccaactgttttcccacttggcattattctgtttatgagatgcctcccacagcgactggtctgccaagcttccagggccatttctgtgaggtatgtaacttgagatatgttttgtaccccaggattacattgcacagacatgatgttaaatctctactagttaaatagaatcaagccccaatattgagttatgcctttcccaaagcctttggatttcaaatttgctacattttactgtgagccatttgccttcacttcttccaacccaactctctcttcaggcccttctgcatcctggatctctctctgggctttccaatcagccccttctcctgtgatgtgcctagctttcctgatgatcttagcagattcagaagtccttataagtgaatatatctttccttgaaagaatattctagaacttatgttcagagcattatcctaaaacccttataaatttgggtctcacattaccctaggggagatcatcacaaaacaagcaaaacatccccaacaaatggattgaacattgcctagatcagaaagaaaatgtgacaggtgtcactatcaaggtcaactttacctacccctccagagtcaagaattatccacaggacacttgagagcacaagccttagtgtccaccagactcagtttgtacctattctaacctctactagtttgagaaaattttcacaaatcactttcatcctgaatctgtttcccaacctgtaaaataaaagtggcatctaggacctccttatgagtttgatttaaagaccaaccttgagccagaggtaatggatggagagtatccagaataaagcctgtgtaagtccacagctaatatactgtggagtgtgcaatccactaagtattgtattgtatggaattcattaagggcctggaaaaagctaatgactcatttaacaccatacatcacaatactgaattaatggcagagcattctctatcaagcattcaatggatttaggttttgcttttttattacatttgtatgtgtgtgtgcgtgtgtgtgcgtgtgtgtgtgtgtgtgtgtgtgtgtgtgtgcgtgtgtgtgtgtgtgtgtgtgtgtgtgtgtaacttgtaggagttgattttcttctaccatgttggtcctgaggattaaatgcagttaatcatgcttggaagccagcacgtctacccactagcaatcctatgacaatcctctctgtctttcttcctcttttattttagacagaataccatgtatcctaagcagaggaacttctaactgagcttctgatcctcctaactctgtctcttacattctatgactttaggtattaaacacaatgtgtggtttttatgaggttcaggggattgaaccaagagccttacacatactagacaagcattctagtaactgatgcacaatcccaatgtacctgggatttttgaaattttaccttgtaacagaccaaccaactactggtggtgacaatatgaattactggttaatagcaactatatactcatatacttacagatgatgtgactcgtgtcacattaaatacagtaattaaatatgaagtaattatattaaatatagtaattaaatttaattactagttaattagtaattaaatataaaggaacagagtacaattacatataagaaactactgaattacttgaagatgaaaagaaaaacctcaaagcaagtgaatcttcaaaaccatggtgacaacacatttgattttgaaggatgtcaaacaagttatctatgtaaatggcatgctaacaagaaaaaacagctttggtaaaaacatatggatacatggaagctaaagctgcatggtcaatgggaaacatacaaatgaccaatcaattagatttgtcaaagtaaaaagcagatgatgaaacactgtcatctggatcctcctcatccaggtgatcccatgacagcaccagtgagcctgaaaccaaatgaagagttcctagaaaatgggatgcagttgtaattggtatgagatgctgctacaagtgggtgaacaagaatctttctacaagttagtcatagtttatcttagaatctgcaagaggatctataattgaatgccaaaactaactcaacgttataccaaggatacaaaagcaacaacaaactgagccttggaagccactagggcttacaagacagtggtataccttctggcttctgcctccagcgttgccagaaagtcaatactagaactccatgagcaccctgcttggtcttatagctcacaataaaattccttcctgaattttttctccctctcttcccaggccttctccaacttgatctcagttctattctgctaacagagcatctctttctcacctcagaatagctgcacttgaggatcattgtttttcagggataggggatatgcagaactttgaatggcatccctcttcatctacagtctcatgactcaatgcctcctgctcccagaatccatccctaacaaatcataaggaataaccagctttatgcacacgtattttgtatcacatcttcacacatgttttccttcatcagatctgtcaaactctataagactgctttatgtttaactgcttatgttgatgtccatattacctggtgaattttgttaaaataaggatcataatagtcccctttacccagtgtcttgtatgtagagtagttgagatggttatttgaatgaaggaaaggtaaaatttggatacagcattctgtgtgaagaatagaggtagcattgaagtcatgaagaaaaacttgactcttacttcctctgtttatcatctgtttaccctcggggaccattatctttccagtacccacatctacatcagataaaataaatctaagtaatgcttatagagtgtttgtctgttgacacaagactgcttaaatcatcttggtcagagtttgtcacttctctttaaacgcttttccttccagaactcaatcctaaggctaaggtaagattcagagtgagattaacagcaaccggaagagatgatgcagaggggagagacacagtatagggcaagctctatgagtcattactcttcacctcacctggaactatttccttattcctacaagcgaacactggttcactgaagatgacaattttcatggaacaattgccacaggttgatggtcagtgattgtgacccaagctatatttaaattgattcaagaatccaaatcatgagctctagcattgttcttacagctcagattcctgccctgttaaatatcacctttagcccagacactcactcaggtatgccaacttcatctactgattatgatatagcattacctgtaactaggcaggtgctggtgtatatcaagggtgtgtggaaagaagcagtgtttctccccatatcacagcaacatcaccattaatcaccctgccagacactgggatcagttgcattctcccataacaagcagactctgtagaggctatagggctatccacaacaagggctaggtgaacaaaacttgcaggacttagtgtgggttgtcatacatttcattttttccaccaccctcaaacacaaacacacacaaatgcccccatcaaaatgttttctttctcttgtaacactacccttattgtttctgcttgactgatttggtcactatcatcataagaaattttcttttccactaatgctgtcagtgaccatctataaatgtgtagggaaattctcctctcctctctttgtcctaaattctaccacctccaccccaaataaattgttacagtcatgagaaaaatttattaaacaaacaaaaaacaaaaaagcactgtgacaaagaaccatgactaatactggaatttagcaagaagtcagctccagtttcatgaggcggcaccaagagcttgggaacattctactgctaaaagtcatgatgaatgactcaaggaagaaatgggtgctatctccaaggcttcttctcatttggtgtcagtttcaggcatatgtaatggagagtggcatgcaggcatgtgggcatgtagcaaactttcttgttgactgacaaagataagctaccccaacattgtcctggcaccagagagatgctgaaattgagtcagagctgactgagaaaggggaagctcccagtggagagtgaagaaaatgaaatcattctgcaatctctctgcttagaccaaacccatgaactctcccaagaggctaagcaggtatgatctcctggaagtatgatacccaagcctgtgagttggagctggttcaccacatgctaagtctgaagtatgatgacatggataatttctgcgtattcttcctctgaggccaaacattattcacattttggtcagttgctattaatattttctggtgctatctctctctctctctctctctctctctctctctctctctctctctctctctctctctctctctcctccctgtgtgtgtgtgtgtgtgtgtgtgtgcgcgcgcatgcatgtgtgatattcttgaacttactaaagttgcacacatgaagctcatttaatcctaaatagctcagcctgtatttcctaaaagttaggaataccacaatataatcatcaaaatctggaaacctaatactactacattactgtcatcatatcctcataaactctctgcctcaaacccaatcccagatctgttacagcttctatttagtcattctgtatcttggtttcttctctcaatttctctaagtatttcatgccctcttttattgtcttgtaagacagggtcttaccatgtatcctgagctagcctctgactcattaatgtagcccagcctagcctcgaacatgcactcctgcctcagtcttctaagttatgaggttacaggtatgcaccaccacacctacctcacaaacctaatatctcaaagagtacaggctaaatattttgtagattcaggtccctcaattagagtttatctgttatatatttgtgattaggtggtgctttaaaaaaaataagtgctgcttgattttagcaaaaaggctcagaggagactcatcagctcctttgagtcgtaccaccccacaagaaacacatcttaacacaagaaacaagaaggagatcctgggctggtgagtcctcagtagcagggcttaccagatgaatgctgcaaaacagagcttgttaatacaggctgaaggcctttctgatctctgtgtcttagcccaaaagcaagcttcacacagattctagatgactgagctccaaacaagtccctgaaataataaagaggaaaacagcaactgaaaatgtgaaattcagaatgtttttatataagcagaaatcatgcaaaccaatcatgcaaagaaactggaaaataggaccaaaaccaggaaaagaaaaaacaaataaaaatgatataaatgatataaattgggctaagttaaaacagaaatgaaagatagaaaagcccctattttgtagatgaaattgtgatcacagattcaacatcacaaaagaaaatattggttaattagataagatagtaatatatccacaggaatatagttgaaatggactgaacctattagcgcaatatcacaaccctgtgggagcaccaacacatgtgcacttagagaccttgaaggagctaaaagtggacaagaaatggatctttgagaaagtgatgagaggaaattcacctattttaaagaaaatcacaaatatacagatccaaaacagccaacaaatcctaagaaagcaaaatccttagcaaggtgtatcataatcaaaattttaaaatcaaaatctttaatttaaccaaagataggaagaccagtcattagatacaactcatgttagaagaataaagtgagatctttaagaacaactgtgagcctaacattctatactcagagaaaacttttcaaggtcaaagatattttctgagataaatgatttgaactgactcacccaaagagtaaatcctttaggcatgagtaggagacacaagatgaatatttggttctttgtaaaggtaaaaatatacaggaaatagtaaaaattttcaataaccatgaagtacattttctttgtgttattatctcctggaaagatgattattatttaaaacagcaatattattaatatattatttaggtcatagtataggtacaactgtaattattgaaaaaaaaagtatatgttctaagaaatgtccttggtaatgctctcacactgtgtgtgagatgatgtaatttaaatacacaggaatactgtgaacactacagtcactagaacaaccatcaaaaaactgtcatcaggtttttccatggcctagagcacatttcttaatgatcctgagctcaaaaacggcgtatatgagcaaagttaacttgagttccccaaagtctcaaaaccagaaagcttgtttaaatgggcagtgctctttcttatagaaactgtgagtgttacacaacacagctaaaggtcaaattctagaaattcatttgttaaatgtaaagacaaacaccaattttgggagaaatcactgaatgcatttgtcttttaaaaacttacatcttagttacttgtcttattgatgttacaaagtacctgacaaaaatcaacttaagcagggaggggtttgtttcaattcatggtttgagagtacagtgtccatcatgaggaggaaggcaggatggagagggggacagtggctgtggtggcaggggcatacagaagctggccatgttggatctgcaaccaggatagaggcataaatcaatgctctcctgctgcttgctttctcccatttactcagcccagaacccaaatccataaaatggtgctgccaacattcagaatgggtctttccattctatataaacttatctacaaaagcttctgcagatacccagagttttgtcctctggagattgatatctcatcaagtcagcactcaagattaattatcacacacacacacacacacacacacacacacacacacacacacacacacgtaagctccaattgatttcattccaaagatacttattttaggagttcacaaatcgaaattttataagacagtattaaatttaaaaagtcaattctaatgtttccatattatttttgataaaaataacctaaataagtatatcttcccaaagggaaaaacataaaaattataggaccaagtctgagaatgagaggcagccaagatggctcagtggttaaacactgaggtctgagctcaacccctgcatcccatgaaaagttataaggagagaatgcatgccaaaatattgtcctctgacctccatgtgagcactgtggcctatagccctcccccatacacaaataataaataatactaatacaatagtttttaaaagaatgagaatggagacatatcaacagagcctataaatgttaaatttttaataagggaagattataaacaattaaaataagtaataactggataaatttgacaaattccttaaaaactagccagtaccaaacttcagtggagaaattacagatgttctgaacagccttgcctcttttacagaagatgaattcataccttttacatgcacagaagggacttatataagtggacagcttcactagaaaaccctgcaaaccatttgaagatgaaataatgcagattccatacaaactgttgcagaaaatagggcaaagaaccctattaaaaccccaaatgagaccttgaccccaagtcgatgggaagaaaaccacaagagatacacagaaccatatcatttatgagcatagacagaaaaatcttttaaaaatttttacccataaatgcctatcctgaatcctataccctgctgttccttctgggtagagaaagcctagtgtctacaaagcccatctgttgtccacattgaacttgtaatgaactccattttggttcatctccttgtgttttcattgaacattgacaagagttgatagtgctgtaccatggttatagatgccctctgaatgtccattgtcctaacctaggtcctatctttctgtaggtgacaatcattgtaaagtttcttttaacagtggttatgacagcatcctccagcagagtctggagctgaagtaaagtccacttccctgaatgtgggtaaggtaggacatgccagaaaggtgaaacccaaacacatgaatggaagaaatttactagttacatatcctggggtttagggtgcaatcaagaggtccacaagtcacctgggggtttccagggagctcaactagtagttgggaagcagcagaaaggacttaaggaatatactctgttaacacctattggcaatgtccataaggttttgtgggtgggaaataaataaaaatccttccaaattaaaaaagaaagaaagaactcttccatcaggcttagctatggaaagcaaggcacaccatatgaaataaattaatagcatgatcttgggaaaacactaaattcaaaaattggggcaaaagaaaggaaaggcacatggtagaatattttaaaatttcttagaagtggacaacactgcaggctggtgcacagtttcccaatgagcccatcaccgtcatctttgcaagacaaattactgtttttatagttgagctaaatatacggtttattgtatgtagtaggtggctcacaaaaggggcatttttttcaataaattcatagatctttgtgtttaatcccaacagtaactttcaattcagtgagatgccctgataagctccatgggagtgagattattagatgccagagagcttggaaccacctcaagtcattcagaaggacaggtggaatcacctgcaatgctgcttcggttcttcttcttcttcttcttcttcttcttcttcttcttcttcttcttcttcttcttcttcttcttcttcttcttcttctttcttcttttctctctctctctctctctctctctctctctctctctctctctctctctctctctctggctctcgctcttgcttttaaatttaggatatcacactcaaagttgattatgtatacattaaattcatgtggatacaaagccactgttggggagtgtagagcccaaacttggcacttttatgagaccagtgttgttttgggtttttttgcccctcctgtgggatgactgtgcagaggattggagaagttctccccaatgtaagggcatcacatcaaggactcccccagcaaagtattacaccagtttgcaactgctttgaggaaacaagaacaagatacatcaccgcatgcaaacctctatccccatggggtctgatctgggacctggttcctcattttcctcccatgaagcagatgccatagtacataagtcaatggtgattaatttgagttaaataaaaaagacatgttctcaatttattcatttttcttccaaaatttagacctctaaaatatcaacaaactttcccaaagttttattattcttaatttttaaagcctcccttccttagaggacaattcaatccatgtgtttcttgttgatgtcctctttgccaggttctatgagttttttcttgagaagcattaatatgtgctttcaagcaaagttcctttttctctttttaaaagctggaagtcattcttcaccagatataaagtaactcatgcacccaaagttttgaattcaggttgaaacttcacaactacaaaccgaaaccgtctgaacttggcatagtccccttcatatttggcccacagagtcattggctgaagaagatggtctcttgattaaagaggtttcaagttctaaataaaataaaaaatgttgagcaaatgcaactaatgataaaactttccctcatgcagcaaaataaagaatccaaaactccttaagttttggatcaaccatgtgtgatactgaacaagttcatcaccacttgatttgtaactaaaaatcaaaagctagagtttcagagagtgcagctaagccctttgtcaaatattcctgattgtaaaattccagaaaagggggctaagagaagtacagattcgtcagataccacccatactatcctgtaaaactgtaactcttatatcaatggtctcaatttagtttcctaggagtttcaatgttgacctctacaatagatgtgcaaaggaaaatttaccctttcacttttattactgcagttccaagcaaaatgtacacttttcaggactgttccttctagacaacttctttgtgatgataattgtcacccattcttcccaccaaacaagactcacttgctgtgcccagagtatataaaaactgaaaggcacagaatcaagctaaacccttagggatctgcttcagtttcctagcacaatgacattcctgagcccaccattgccatttccaaaggccttgatcatacctgacctgtattagagccaaatctgagcacagcatttgtactttgagaatgtatcagtttagggcttcctcttgagaagcttcgccagctggccattctccagagtggcgattgaggtaccagcatctcacactgaacaccgtattcccttggcccctacacttgtttctcccacttcccaggaccaacttatataacatcagtagttcttgccctctaagtagtcctatagttagggcttgtctttgaaggcctaactcttccactaggacatgaagtctttgaattctctgaatgtatatattcatcaaaaaagttccagcagccggcattttaaaagatttctttttcagtatttttaatagtgaattgatgctcaatgtatgtaaactctgtacctgagttccatgcccaacactgaccacaagtaggtctgttataaagcgcatatatacttcagtgtcttattttctaacatgacaactattttcctgtgaaagactagacagtaaatgtgtggggcattgcaaacttcatgtgtcctttgtcacttttcttctgttttcctttgtaaaggatcattcttagcctgcagcttgtacagaaacaaaccaggagccagaatctatgaggtttccttggctgatacccctgacctaagatcatagtgcactacagaacactctgtggcaccggcaatatctcctgaactgcttagagtagtagtcaccagccttgtgatattatataaaggcattaattatgattaaaattaaccaaaacaaaatcaaactaaaaatccagttccctagtcaagctagccatatttcatgtgctccatcatctcacatggctggtgactagcgattattcacactacccacccccttggaaccaatatgagtaaatggtcttctaaccaaccagtcaactactagaaaatataaaatggggcaaaagagacagaaatttcccaagttggctaaatgcacaaaacaagactgcatttgtgcacaaatggaacaaaggaaagattttcaaatgcaggtgggtgcatatagtcacttcagttaatggattcataacaccaaggtcactctttgccatctacaatactagcacataaggtgataaattggaaagcagtgccttcattttacctgctgagaaattgtatctacattccttcaaaggtaccacatcaccaactgataagaatccatgggttcaagtggtgagcaggatgcttgcttctccacctagtaaaaaacatctgctatgatgtcagtattgttaaagacagtggaatgatacacaatcccaggcgacaggggaaatgtacagctaagactaggaggcatgaacggatagtgagagcacaatggataaaacagtgggtctttctggtccaaggactatagcagagggatgttagagcaagtgagctggaagaataagacagagggcgtgtaaaataagtagattttgaaatggaagctttggagctggaaagttactgatgataacaaggactgagataaaacttgggactgtgaagcataaaatggtcattagatgtcaggaagtaagggaacaagtggctgaggcattagaaggccagctgttgttagaagctgaagtcattcacaatgatgaaagaagtggaaacaggagccaaagttttcagggaactggggatagggtcaggatggcaagatcccacatgaaaaaaaaatatagaacagtaaggaacatagtaggagcataagtagatactaagggcagatggcataaccctgcccacccccactttctttttcaaagagcctttcctctcccaccttcatttacatgaacatctcctacctgggaaggagctggcctacagttcagtgggtggagtgcttgcctagaatgtatgtataagctctgggtctttgctggtctccagcaccagaaagacctcgttgattattagaccatactgttaatcatctcttcctggaatgggactgcccagtctatcaaaggcatatatcatgagggcatcaaggagtcagggccagctttcctctctgtttagaagaggtaaagagttgtaggaatgagagattccccaaacagagactgaaagacaaagggaaaactaacttatttcaagtaactgacttacagaattgtaaggctggcaaatctaaagtctatagagtaggccagcagtctggagaccaaccggagtgtgaatgcggtagctagagatttctgccattctccttgcagacttttgtcttcccctgagagagtcggtgtttttcctgaaggctgtcaactgattatacaaggcccacccatatcaagaacagtaatatgctttacttgaagtctagagagttagccagagatggtggcccacacctgtaattctagagtttaggaacatgaggcacagctgttgcaagtccaaggtcggccagcctgagctacagactgggcaccaggtcagtgtaggctatacagtaagactgtcccaaaaatatacacgcaaaaataaaattgcagtgatttgaatgttttaccactaccaccaccaacacaacaacaacaaaccacctaaacagccatgaagagtgataataagaaaccaatactcatctggatgatctttcatttaaaatagattcctaaaccctaagaataccatccattacccaaaattggtaaagaaagacaattctgtgatgactgtcaatctcgatttgtctgattgtctttcttgagggaattttatttctcattatttggttccttttgtgcatttagctcactaaaaataagcctgtatctacctttacaagacctgcttactcaggagacaaataggagatctacatgtctctcaagcagagctgagggagggacttggaaacccaggtttcttggacctgctttcattttgtcaaagggccttttagctaacgttttatggatgtaggtgatgctagaggtcccaggcttaaatacactggtttgttatccaaaaagtactatttacactaatgttcacagcacataacagcagcatagacataaacagctcaaactataatcactcactgcataggaatcttgtatattttagaaccttgctaaggatctaggaatccctcaacatctacacagagagaatgtgagtaattaaatctcagttattgctaaactcttactggaatgtaaggtatctttcacctgcaaaggtagaccgcttccacagaacctgctacagatatttttcatataattttatatgtgtctttcatatttcaagctttcattaatgcttgtcactacaacaaaatcacatcagttattaaactcaccattagatttggttatttcttgcagtaaaaaaacacatttatttctatataaaaatgttcacatttgatagatatgtctcaagatgattatatgttttacatttataatatcctaatgggatgtttaagaatatgtttcaaaagcctgaaacttgtaaataatttttgtaatttcttttcattttttttgagatgggtctcagtatctcactatgtaactatgtagctctggctgggactacaggtgaatttgggcttttgtcatttctatttgagctttacagaaatgttttcagaaccatgatcatacttcttggttatcagttaacatgcttctccttacttactcctgacttcttttctatacatttgttctctaaggcccagagtatgacctccaataaccataccttcagttatgaataggtgaattggttaggtacatagcaagccaaaacaaaagaataaataacaagacatatacagatggtggttgggtgggtggatggatggatggatggatggatggatggatggatggactgatggacagacagacagacagacagacagtaaaacatcatcaaatagggtactcaaaacatctaacagaaactggcttggaaagccctttaaggcagcctgagtgactgataaaaagagttctgggctgagtagatcatcattcattatctcaaaagaggcttccaataaaaaagcaaaggaagaatacaagagcaaggcaataccatcagtttggttcttacaaacatcccatggaaaacaagcagagaagttgagccagtcagggggagctcctgactgagctttctcttgatgagggccaaagggctgcccatgctgaactcctagcttcactttcccactgaaggcactttaaaatggtgggacaaacaacagtaattcctgttgggaatggcaaccttttagctgccctccaagacaccatgatttttactcttggtggcttttctgttctctttctgtcacagaggtgaggggagcatcccatccccagactaggcatgattgggtatgaattatggagtggaggaatcctgctcccagaaccaacttctcactgtactcaaacaatatgaggcaattaaccagtataatgtgcattggagtacttattcagccagcatataagctttcttaatctttcctccagctatctgcttggttggatcagttggaactctctatataaatgaaccttatacctaaatttccaagtatttacattcttgatttctttgagcttatctccttgggagctagaagtgatcctcagtgccacgggccacaatattatgcagatttgatggtgacagtttctttttcagaaataaaagttcctgggcatattttcccctcagaacagtgtagtcatttttccagtgagttcttctactgagtgatacaataaaaaaggccataagtttgattttcttctctctgtaaataatttactgtcattttccttaaaaataaaacttcattatttacaatgattattttacccagagtatgtctaaataattatggctcttaactaaatgatcctgacactcttttatgccatagctttttcagcaatatagctttgaatgactcattttcttggaatctattattcagaaatatcaatttaaacttagtaatgtttgtcctttgtatctatcaattttcctccatttctgttttttcttttgcgtttaactcatattcactgtgattattgcaggcattacctaaacaacatgatataattttccctttcaatgttgtacacaataaattacatgcctacatttgatttgtgatttcatatatgctatggttttggttctcaatatatttctagatgttggtcatgtctactcatctccaggcattttcccctttcatgctgggaactattttctaataaaacatgatcaatctatgttatcttttcttcttcagattagggctctaaattccccaccatccttctacaaagtgacctccagaaccatgcaatacaatgagacaaaaagtgaaaaatcaaagagcaattgtgtaatgtatgatcaaacatgagccctctcatgatacataagttctaagtgtttcatagacctctaggtacctttaactccagtcctctgacaagaacagggtcctctcccaccaacctccatctaactatgccctgtatcacacttttgggggtcactccacagtcaccttttgggagagatggtccttgggtagggtttcaacatagaagcttgagcctgttgtcttctgctgcatctacttggttcaaaggactaataccaactaatgggaggacaaagtgttttctggtagctctttcttgtctttttattactggttcctactcttagaacttaacaacaaaaggaatgttccttgcacattcaaaagctagaagaaatcctgcagggtgtcctctatgaattctctctccttgctctggcctgagccaacaaaatggtttccatttattttttcctccacagtaaacatatgaatgctttctcatcttgaagattctttacttcccacagacaatggagtttgtttgttttggtttttccaaaggaattaaagagctttactttaaaaatgcaacactgaaacatgcagatgaaaatatagggaacactcttcaagatgctggcataggcaagaacttatagaacagaccttcagcagcacaggaacaagacccatgtatcaacagagggaaccaaattaaattttcaaaagcatgcactcttaaaacttttacttgtctgtatgtgtgtatgtgtgcatgcaagcaggtaccagtggaggctggtaggcatcagactcactgaagctggaattacagaggtctgtaagatgccaagtgtggatgctgataagcaaactctggtcctctaaaaaaggaccaggaatccttgtatagggtacggagcatcccccactgcccccaagaagaacaggaccaatcagctctttttaccagtcaagctaagtttgtcccattttcttgaggatacaggaaagagttcagcttagcactcagaacacagataggaaaacatcctttttgcctaatatttctaatagtctgttcaaataatagtgctgatagatcattgatattggagtagaaatggttaatgtaatgtaccctccaaatcatcctgtatttcatgatgttacacaggcatccatgtttctgtctggggacgggacaggctgattcattgaacattgaatttactgctgagtccagtggagaagcagtggcaactcactaaagaaatggaatgatgcaatttccctttcagaacagacagaacaaagcacagagatgaaattatttattgtggggctctcttggatcttatcttctctaagagaagcatccagtcataagacacagtcagtttaagtagatgtttctcaggaaagtcaagaaagcacttcaaagagggactagagtgacctttccagaaggggagccacagactggctggctctatattatggaatttaaagaagtttttatgaatatttatgaggtggatgatatatcatgggataagatggccttcttccttgatggaccagaggtcccttttagagtatttcttcccatggttctctagaaaagtccttgaaagagggatgagacaaaccatgatataaatgacatcataatggagtcaaggtattttgaggatgcagactgtgttagtacacatttgagaacatgtcctggtatttcagcttctggtgtagcaggacattctatctgtagcctcagacacacttactcacagagtcatccagacatcaggagacacaactactaaaatgtggccattaagacagttatcttggctatctcatacctaactcccctttgagaactgtcatattgtgtctctgagtttaaaaatatacagtttaaaaaaatagccaatatgtttcattgaacacatgtatgaaagtcttaagaataaagtgaaataatatgaaaataacaaataaaaagttaatcatttaagccaggcatggtagtacatgattgtagtctcagaacactagaggtacaaatgaagaatcatgagttcaagaccagctggagctgtaaagagagatttttgtctcaaagctcaattcattggaaaatgacttgtccttttttctttgagtgactcacaacagtagaaatagaatggtattaaaatatttccaaacaaaccaacctcttctttccttgcccttcccttcagtatagtaaccattgtctctcacactgcagaggcttaagtgaccattacttagccacaagcttccaggctcgattttatatggcctctgcctttccctttccaatccatgggcaaaacaattctacttttatttccctcccacatttctggtggcttttgtgtacccattaacccttacttacctgagacacatttgtccccagcctttaccacactacattcttatattgcttcccttttaacaagttgttttctgtacactcgagattcctaagggaactataaaattgatttgtgggctacttctccccaagagggatgctgacaagatctagagtgagttttaccactcctgaaattctcacctggaagtcaattttgatccaataaggagtcagctttaagtgttgcaaccccaaaggtacttagggtagctacaggggtattctaccagttgcatgtacaagactgaaatataacaacactggatttcacaggacttagattctaggactaaaaatatattcccatgggttggtctttgaccattcacagagcagaggaacaaagcaggcagtgtacccagaaaacagtctccctcctgcactctgactaggatactcaacactagattcacaaatttcctctcaactaaatgtctttgtaaaatgagatcaattcttcacagttagtataaccttcaagtaaacagagtgcacataaaacacttaaaatggtaccagtgggtttggggtatcgtgattttttctttactattgccacagttttccctgtaaatataaccattttaagtgtctgtaaaacaataagcaatactaacacattttacctattatctaatgtaataatattatccctaacaagaaccttcattgtaattctccccatttcacagataaggaaattggatatataaggaaagaaagattactcatagtctatgccaacagttaaagttggactcagactaaaaacagaactgacatgccaatgaagaaagagaatacagagggggaaaatagaaggagaaaggaaagagaagaagagaaaattcctaactctctattatacccctctgcctcagctccctatataatttgactacttgaactctccaatttccgattttaacagctacataataaggaaattgttcttcctttccacaagatttatgagaagattgcatgggccaaggtcaccaagcatgttttataaacaatgtagagttggatatacaaaaggaagattagtgttgcaagtatttccaatttttacagatcataaaatatatgccacggctagttcagatgccacctctctctttagtacctcagatgtagcatttagttaatacagttgctgaactccttacagacagtagctgccatcgaatgggcatagatgaacaagagtcaatcactgccttgctgacattcatgagcctctgaaggacagagatttgatggtgaataaacacatggcaaaagccataacagaggagaaggacatccatgcagtttggataacttactttgcccatggtggggggagtgggcaggaaggaagagggggtggggcatcagcaaaccttctaagaggaaaagggcttccactgatcctgaaagatgagtaggtggttgtgtctccttctctactactagttggcctcaatggatgcccagtcattagctcttaggagttgctgagcatcggccctggtaatcccaacattgggtatatatgaagaaagactccaaggtgctgtccaaatgccttgtttctcaacatttacatcacccagggtggattcctcacccaccttcactaactatgacctcagctcatgactcccccaatgtgatcattgttagaataatgtttggggtttgaatccctatgtctggggttgctgtgacctgaatacatatttctgcccacctatgcccaccataataatatgtgtttctgctcacctttgctcatcacaggaagctttgtgagtaagcaccactgcactggcttgcagggaaatggcagaaatgtaagagagaaccctcattgagatgggttctgagagcaaaggaaataacctcaaaaactttagctttcatgagtgtgtgtgtgtgtgtgtgtgtgtgtgtgtgtgtgtgtgtgtgtgtttaattgttttgtttctaaaactcaagagctctcaaagtatgttttactgccaggagccatccccagtggtggacaggtcccagcaaaggatgtaagtagttggcaagggacagaggtgagccaggccatgatggttgggagagtattgcagctttactaatagcagccagagttcttctttattcatatagaaatcagtaaacagggatacattcatgttgttccaaaatatagatcatatcattttttgttttggacatgtgtttcacttccttttgttcattgtttagtcatcattaataaattatgacagaacagagttatcaattccaatcatttttgctcaagttttgacatcattgacaaacagttatcatctttaatcattattgttcattaacctcataacccaatttttaagaatctaacatctgacggcctgttctcaggctggtagcttttgtggctataaggatattagatcaaaaccatctgcaagcctttccaggcatacatccatgtcctaagcagtgtattattaactcttaatggtcagagtgaccaagatacatcctcaggctaaagctgctacagttattattcaaattctggcataacactatgtttacatttatatttttataaaatttgtttatgagtctaattctggtattctgttgttccttggtcatatgacaccatagtggctctgcatgagctaacttttctaagaaagggaggtcctaacattttattcttttatggtctgtctactccattctttgttaatcaatgtaagtctctgtgtagggctgaggtaactttagttaatctaatgttgatgttgcatctgccacataattgcctgagtgtatagtgggaagagccttgcaatttgaactgtggccatcttctctagcccactgaatcttgttgacctttttgagtttactttgtttttaattttttattcatgagtaagtacagggacagaagtttcaagagtctcatagcctcataaagagacctcaggcttttttctgtgtgtcacaacctacaagtcttaaggaagaccttcaagtagataagtatatctccctagaaggaggaggggtagtgtgttcagtactttcttgggggaggcttagaagcagtactcctggggaagaggcataaatgattcataagaaattttccatcaacccaacattcccaaattgtacaaataccaaaagtcccccaagttaacaacagctggagataaatccaaaggtggcatgcaggccatcatgtggctcagcattgttggatctttgtcaagcagctgtcctggctttatgacttctgcctcctgccactaccatcaactgtagttttaactaaatctctatcattctatttatcaataaaacttgggtgtcagagtctggggtgaaaacctgctaactcagagagattgaggagcaactagatgaccttctctctttgctggcatctcagaaagagaacatcattccacccgaccaaaccaaaacagaccaccacactcaaagtcctccctactacttcctgtgtttctctctatccatcttccagacaatccttaactctctatgatcgtgttctatcaattagtttctagctttgcctcctgacccaaggttgactttatttaattgatgcaaatgcaaacttgggatttacagtgttatcatattatctcctacaacacagagatctctgaacacatacaacattagtatttaccaagtgaatagatcattttgcaagacatacaagatgatccccttgtagtgaagaggatcacagcaggtttttcatgcctcttcccaccatgcccagggagccctccctctctccatgtgtaaactattgtcaaaacctgagtatatgtggaacaaatgaaactatatatatatatatatatatatgtctcttttaaggtcaacttggatgctgtattgctatgataaggttaaaccatcaccagataattgcactatcaatttcaaattatcagaacacctcctgggaagcctgttaggaagacagtcatttaacttgtcaggtgaacctgaatggtcactactggcatcttcagaagaggacaggctttttgctgtagatctgtgatttactgagtttgctgtggaaacttctgtagaactggagtcacatacagctgagaaaacgttgggtaccaccaagatcagtcaagccttctagagctaaatttttcttcctagtctactcagtatcactcataaaagattaccattcactcagcaattgataaataaaagaaactgacaagtagcagagtgtgacactggcatgtggaagagcctttagacagtgtcatcatatggcagaaggcaaagagcaagagaaaataagagagagcaatcctcagctcaaggagggcaaacaaaacagtttaacaagtccatcatcattgcaatgaacccactccagctaacacatgatacatcagagccctgcatctcaacactgtggcactgggaatggagtttccaacacatggactttggaggatgcgttcaaatgacagcaacacatgaaaagtttcccctgactccctaataattacctttcactcatttccagctaatctctcatcatcaaataaaaaccttgtgctcatctcccactaatctctcctccaggcatatgggtattgtcagtagaggaggactaaatgacaacagcccattggctcagtgcgggggcaaaacaccccatttagttcactaaacagatctttaaatctgtgaggagacaagagtcccatccaaggcggtaggtttctaggttctggtgaggggctgggcatgatacactgtcatattgaatttgtttcccttataagttacagctcagaatggtctgcagaggagaagctgggtattaatactctttggagatggcgaggagtacatactcattgaggggatcactgtgtagatagtgtggctgctttcccccgttgtcatgctaatcttgggcctctcacaggtttgctatttcccatgcagaccctctaagagggagggagggtttcaggtgatgtgctgggaatgaattctccctccccatcatccagagcttaagcctgctcattcaatgacacttcacaataccttggataattgcttgtctgaattcaataaacacttcatgcattaataggattttactagcagttgagccccgtcatgaaatttgatttcttcttttcccctccccctggctcctttgtaaacagtcctgaaatgcttgtcagagccctctgtttgcatgggctccaattaaagcatcagcatacccatgtccctgcactctctaacaggtgtagaattatgctgggaatttccctgtatattgatgcaaattccttatgtcccaactactgtgtttagctctaagtctataaactaaaatgatccaaaggactgccaatgtaggcttccttaattcggcatgttgtggctgatgttttttaaagttccatatcaaaaagtccaacataaacacacagtccttatctggttctccttatccccagcctcgagacaagtaaagccctatacagctttcaggaagcaaaccaggtagccattggttatgccaagtgtgggagccataaggtcaatgctatcaattctactaggcaagctggtagtactcttttgaccctagacactgaacttctgagctgtgtgaggtctcacacaaacactgactttgtcttaagtttcactccaattcatgactcatcacctcaagtgcatgaaagagcaatagcatctgctgtaatatggagtaatttctcctcatgattcagcccccaagcggtcataaatgtgtctatggcattaggaatcacttaagtgtagttgcaccacattgtctggtgtgaatacaatacttttttaatttgaaactaacaattgtaatctgagaagtagggcactttcccatgttatcaagagttcatctatacaagttataccctgattctgtaaaccatcctcgctggagaccacagtactataaaaccagctagaacatttgcaatgaacagaatcctgccacccaactagaaactgcaactgtttgttatactttctgaattccaacttaattctttccctatatctttgacaaacactttataaagttgatacaattcagtaggaaaaaaattaaaaggcatatctggagatgcaagttcccgtcagaagagctagcaataagctttgtggacttggccaatcaatcatttacttccttcggatccactctcttatctatgcttcctaggagagataacaccactggtaaggtagtaggcaattgtgttttttttcaaatatcaatattgtcttacactagaagtagtgtaagaaggcatctgaagattgaggtctctcaaagaaggcagtatagggacacactctggctccacactcagtggctgtgagaacacaaagaagctatgtattttagtatctgtgatatgtggccaagtagtactagagaattaagtgagttagtttatagagtggagcccttggataagttctacaagactccataaatcctataggaatcctaaaaactctactggatgaaggcctactccatggggagaccctgctgatgcatctacttgaagcaatggcacagccccaaatagctatgcatctcaatggaatgttagccgtcactgaagaattttagggaaagtactatagttgtatttcttttaatcacaggatattaaccagggctggagagttggttcagtggttagagaatgtattattcttccagaggacctgattcccagaacctgtgtcaggcagctgacaactacctgcaactccagctccaggggatgtgacacctctgggttcaatgggtgggagcacacacagacagacagacatcacaccacacacacacacacacacacacacacacacacacacacacacacacgagagagagagagagagagagacagagagacagagagacagagagacagagggagacagagagagatgcagagagacagagatagagacagagaaacagacttcccattatactgccaagaatgcctttgtttctcctttgccactctacaccagccttcaggtaacttgcatggtctatggcatgccatagttacttacatgcaacaaaagttaaaccatcttatcttctctgtgtagattcactggtctctgaactcaattcttccccaggatatttgccctcattgctcactacctacagacacccaccagatgtcccacaattgacccctcctttcttctaatctttattcaaacaatacctttctaagcaagatcctcttgacaaacctacctataattgtaactctgaacattttctttttaaaaagttattaatgtttatttgctatacaaagtgatgggtttcataatgagattttgttctaatatattatatattctgacaatattcattccccattagccgctcatgtacctttctccttcttcccaccccttactcttcccaagtagtcctccttttacttttatgacatatatgtatgtatatcatatatataaaacacaatacttatcattctaatatgatttctatttctgttcattttctatgtttccttctagaagtttcagaatttcacgtcatatgctaaaatctttaacacatttttaaactgattttagtacatggtgaaaggtatgaatcaacttccattcctcttcatgtagatatccagttttcccagcatcctttgcaaaacaggccaccttttctccagcacatgttttgacatctctgtcgaaactattgttgactctagccacctaatgggtttatctcaactctaacattttcaatatagttactttgttttactttctcagtagcatttaccatgttcaaacatgatagatactcacttcttataatcattttaattgtctgtcttcctgaatgagtatttaagctccagaaaggatcttatcttttccattaactagaatttctcagcctcctaaaataactcctgtacactatggccaaatacgttatcattgttaaatgagtgaacaaacatttaccaaataccactttagggtgggcactctgctagagccctgagaataaacaacaccaatagacttgatgcctactctcctgtggctttagacgttagctctgaagagtgcagattaacacacagtgttccaagaatctagaaaatggtaatgggatgcaatgttggaacatacttcactacagaggaattctcaggagaaaaacaatcaatagccagggaagaaatgaaattattcttcagagagttgtagaggacaaaaagaatttatccatcccctaaaaaaatagacttccctttcactctattatctcatgtggtgaaataaagtcctgctttgtgtagaatatatgccgactcagaaacccatggattctttccacatgacaattcagcttagatgaagcatagagttttccatccagacactcgaatgggggagagaactactaagcatagggatgtgtggcatagctcagtgataactcatgtagtgttgaacagggagtgtgcatagagaaaaggttgcaaaacaacctaggaaattaggagattccccagcaaaaccagcacatcctattatctttctatcagccaaggagctgactgagtggttgctgatggttttgtacttacctacaagtctccagtatctaatgaaacatgtaatttattattgaaagtgtaagttgcatactactttccataaattaaaatcattgctttatcctaaggttttggcaagtatcaagcccattctcagatatgtacagaagacacatgaaagtagacactgccagctgtcacaaacaccaatagatgaagtgagttgcttagtttgtgtaaaactatagttttacacaatgcaaaccttactagaggttatcagtcttgcaacattgatggtacaagttctggacatcccaggaaaggcaagaaaatgggctctcccttcaacactactcccagaaaatgcaccacccttgaagagaccatctgaggaacttcctcagttacattcagcctagaaattcagagatattgcattacttgagataagagatacaatgctttatggccaagagcaaaatgaatttgtcactctttcttccatcatttctatcataaaaagcaaattgcatcttgaagaggttaatcttgataatctattttaagtgaaaggaagtatattacaattcacatcgtgtctaactattccaattcataaaataagcatatggacatgtatgtatttgcatgtgttatgcatgtgggcatgtgtatgtccatatatacatgctgggaggactgtgatgtcagaaaagctaagcaaacattctaaaatgctaaggaagtatcactgggtattaaaattgcaagtgacatatttcctgctttggtctctttcacaatttgctaaaaccagtttattttcctacccaggaatcacatatggaaagacactaacagaatagggcctccgcaaagacagacacaagggttggggaagggctgcatgagtacactgcaattctctgtagtgtgcatcaatatccccaaggtattaaaagaacgcacagacatgctcacagagccagcctcggtgattctagagggatcagagagtaaaggcatggatccagaagcttgcagctctacaaatgttgtccagattttcaaaggaggggaactggtgaatgtcaaagacgggatcccaaagcacatgacatcactccctccgtgaattcaagaatagattattaaacagatggctctgagttcttcacagaggaagtacgggctcactaggaacacatcatggcaaactaaactcatttctttttggtgggacttagaggtttcaaaggagggagggagttgttatttcaacaaggcacaagataatcttcactgacatctgctaaactctagcactttcctcatgggtggaatcaggccaaggagagatatcagcagacacaccctccaggataaaagaggcccttgggaaattgaacatatggctgagccacagggaaaaggagagacaagtcacagcacggatccctctataagaatacctactgagaagctcactgcccaaatgtcacctgtaagtgagggctcctctgaccaccttctctgatcccccactatcactctgtcagattgttttccttcaccttgcttctctctctctgaaaatatcctactgatgtattaattttcttgtagcccctccacccactgaaacgttggtcctatgcatgcaagaacaatgtctattaggcccaacacagaatgcccaaggtccaagcacacaagagtcaatcagtatttgctaggggaatgaagtctgctgaagtacatgttctgttccttattaacgtccacaaaactgcattatttctattcctcctctcaaggaacaccaaagcctcaacacgacctccttcctcctcagtctctctgatacaaggaaagataccaaggaaagttctcaatcatctaaatcctctcttacctgataagcaatgaccacctgtccatgaggtggataagcaataggagacaagcaaatgctgtagtagttgtaattaaccagagctctggcctcaaattgtgatatggagagcctcacccaggtgatatggactggttacacgtgagcatgacccaatgtagaatagccttttatagtctctacagccaagcacatctctccctggagaagagccgattaccaataagcaaatttttctccccagaggccaactcaacaatacaagggaggagacatacccccaatagactatctctactgtgccaatgatgattaatcttcactgtcaactggactgtacctagaagaaatcccagtgggtgtatctatgatggatttctggagatttcatctctaaagaggattccatcctcaatgatggaagcacagccccatgggcaggggtcccaccaagctaagcaccatccttctttgcttcctgactctagacacactgtaaccaatcaacttcctctccagttgacttctatgacttgatggcacagattccatccctcaaacaatagccttgatcttagccaaaagggcaagatgtgatatcccttattgcttcttgttgagtctttactcacaaaaatgagaaaagtaaccaatacagtgacccactggttcaaattttttctagggttaaccccaaactatgtagatttgtctttacagggctttagacaagaagagaagcaagctggtactagttgttaggaatggcttctgaagccaggctgtctggtcagattacagcttactgctcactatctgttattttaggccaattgattaatttctctgtgtcttagttagtacatctttaagatgagtgtatatatcagctacataataggaatttttcaaagactatatgaatgaataatgaaacctcttagaaatatatttacagagagagagagagagagagagagagagagagagagagagagagagagatttgctagaaagtctaatacttcggtatattttcataaagtctttagcatgggtgaaactcctgtacctttattaaccactgagctcagtattaaactgcagaccctacacaagtataacaaggataggcagatatcataaaacactggaaaaagatgtagatttccaagtccatttttgatattctgcttgtgtgattctggtcatattattatcactgcccaaaattatacttaatcatttcttaaagtagaaaaaatagacattagtaattgtttaagttttgtcatgataagattatagttttagtaaatcatacacatggtggatatgttacaaggaaaagtactattatctagacatggggtttttcataaactccagcacttacaaaataaaccaatcactaacagagatgaaaatatgaagtatagtaaatgcaccaaagatggactattttgtgtgtgtgtgtgtgtgtgtgtgtgtgtgtgtgtgtgtgtgtgtgtgtgtaccctacttgtccttttgactctgcagctcattggctatgtggccttgtgaaagtcctctgggcttcagtttccttctttgtgaagtacaatggaggaccctaatgtcaccctgatttccatcttctggacagactgcaaatgtggatctgtgtggatatgagttttgtgttgacaaagcatcaagtagcaaatattaatcttatttagttaacaattaatgtattagcatataatcgcttagttgtaccaagtacatctaaaagattctccttccaaatatagagataatgagttatcagtaagccagaaatattttattccttcagcctcccctgaaagcaagaaggaactctttttaggtgctgtaagtggacttcacaagatcatttgccaaacaatttttatagcaccaaactattgatgaaaaatttattcattctctaaatattttgagtgcctataatttgaacaagactaaaataactaaaaatatcccaaatctaaacactcatattccaacagagaaaaatgtcaactgttcaatggataatctactactaccaattaatggtaggagtttggcaagtgggcaatatttctaagaggtaacttctagaactggattgctgccttaaagagagttggtcagggaaattatttctaaagccagtaacattacactaaaatccaaaacatgaatctctatgttgcaaagaaatgggggtacatgtatgagaaaagaggaaagttaagccctggaatccacaggcaggaacaagctaggaatgtcagttaaagatggactacagtgatgagacattgagacattctgaatatgagtgagaagtaagacttcagagggagacaccataaaatacagaacaacaataacaaaaccctcttcactccatagaatgcagtattctgtagggagacaccataaccacgtctcctaagggctggctacaggtgtgcctgaccacgactgtcaaggcttggtcaaggtgaggtcagagtgatacgccatgggctcttaaggactaggagcacatggaacagtctcttccccttcggctgccccttctctctggcctccctgtcttgcacgctctggcttgtgtttgactggtatttatctaaataaaggtatcttgaatctataagcattctccattaatattcaatggagctagttatttgtctaagagccatgaagaattcagactgactgctgactgcttcccctgtggtaatatacccaggatttctactaactacctctatggtgcatgagagagagagagagagagagagagagagatttatttgtttgtttgttgtctgtacagtgttctgctacacaccagaagagggcaccagatctcattatagatgcttgtgagccaccatgtgattgctgggaattgaactcagaacctctggaagagcagccagcgctcttaacctctaaatcatctctcctgcccctctatggtgcttttttggttcaataaattatcaacaagctccactcactttctgtataatttataaaattttggattaaccaagatctaccatttattcaaaaaagtcatgcctaatacaagtgaagacttttggacctgaaaaatctagtcatccattggcttatagttaactaacctgaaaagggttcagatgccttctgtgtatgtccaaaggtgatcacagagagccacaaggccaaaaaatgaaagctatagggaggcagatttcacttcaaaacaaggcacgactctcagctaaacattttactagactagggatcaaaagcctttcacagaagggtcttgtgttagcctttctcatcactgagagaaagttcctgacaaggagtaacttaaaagagaaggaatgttgttttggatcataatttcaaggcagggtgatggtggctctagtacattccatgacagtaggagcttgctagctgttccatccctacagctctaaatctgccatctcgaccggtattcaaacggtttcacaaccttccatagcaaggccaccagcaggttcacacacatgaacccattctggcatggtatacattcaaatagtaagaggtctagaatagatgtactgtagtgtttgcaggatgtgtcttctctgtggtaacagtgaactctgcctctgtaggagaaatgcagacttagtcaacacattagcaaatgtgcatagctttgcccaatcagaacttgcatagtttcctcattcctagaacaggcagacaaagcaaaatggcagttcaaaaatgccatctcacccccattcagtctttatttggctttggttgcactttaaaacagagaggattttactaaatgtccagacgccttgctttccttgagtaacccaggacctacattcctatatgtcagcaaatgtcaacaattgtctacagttgagtaatggctgcccactttggacggaaaagggaccctacaggccaccaaactccccaccacagacctgcttcctgcctgactctggatttcataccacatgctacttagcaggttagcccattttcccccttgtggtaggaagttatttctctaaaccttcatctatatcaaatggaggaaaacaaaagacagattgaaaagaccacatttcacgaaaaatgaaagaagacatatgggtttaatatgcatataaaagatactttgttgaaagagccaatgtttctgtttttcaatttgtattttttctagttaaatttaaaacatttacatatttatatcatgttacatccttatactatagtttggcaacaataaaaatagttcaaatccacttctacctttgattttttattgcaagttagttttatctagctataatacctggccatctcccacaggcataggctaacaggacaccctcccctgagggtagctgcaagctagagaatgctagatttaaacacacactggatccttagacaagaaaaggatgggctgagatttcttcaccatctactagaggacaaagtcttgcagaattgtttgacaggcctctcggcagtttcatctcctgacttcttattttctgactacaaaacaaaacaaatcacatcttattcacttcaccttttaagagagatcacaagccacacaatttaagactccaatgagtttgcttgctacttgtttacaaatgaattaccttataatttattgcatggcattttaaacttttatttggttgttcttatagaaatgacacattacagagaacttaagcattgtcaaactccaataatttttagtctgaagcaattttcagttttcatgtttccagttattatctcagagagacacgtgcacttgcaattttgttcatttcagtttgggttgcataaatctttttggtcactggtatcgttatcagtattctacttagtgagatattctttatgctgaaagtcttatgtataggtttacatgcgtgctcagactttccttgtactcttcttggtgttttatattctccttcagagatgggttatttctatacaaaacagaaacagataggctaaaaaataaaaactgaaaagataccaatcaaaaaaacaagttgagggctgagaaaggattcagcagctaagtgaacttgctgctcttccagatgacctagattcagttcccagcacccatacctggaggctcacaactacctgatatcccttctggcctctgtgggcatctgcactaataagcatataatcatactcagatacacaacacatacacacacacacacacacacacacacacacacacacaccacacacaaatgaaatacaatctccatgaggcagtcaagtggggaaagaagcacacattatctaatgacacatttgcctttagaaacacagagtattttccaatggtctcgtcactaccatctgctttgtgctgaatgactattatttttcccctactcactagatcatctgaagctttgttcatgtgtgttctagtttgtgattccattactggtacatataaataaacatatatattatatacatgtatatacatacaccacacatatatacatcatatatacatgtatatatgatatacatacacacatacatatattatatgtatatacgccatgaatacacacacacacacacatatatatatatatatatatataatatatatatatatatatatatatatatatatatatgagagagagaccaaaagcaatttaacgacaaaacagattatttcagcttacttttccaggtaaaagcccatcactgagggaagccaagacaggaattaaaggcaggaactgatgtagaggctgctgagaaatactggttgttggcttattctcttgtagctcaagctctgccagctttcttagaaaactcaggaccactttcttagtggtggtaccacccacagggagctgatcgctgatctctcccacatcagtcaacaatcaagacaactccacatagacatgactataagccaatctgagctcagtgatgcctctgttgagactcccacctcccaatgtctcttggttgtgtgcattttttgattaaaaactaaccaggtcagtatgtcagtacttacacaatgcacagactcctgttggaccagtctatcattgggtcaaacaccaaggatgaccaaaccacttattggtttgccctgctgtgggtgggagccatacatttctaaggtttgagaagatgattgaacagagttctgcctcaagcagaacccagaaccccaatgtttccagcagttcaaaacaatttgctcagcatgctctgcctttgacaaatgcttgtcaaacctatgatgaggaaccacataaattttacaaataaaatagtaataagagttatccaaggcagttcactggtttaacacatatgacatgaggccttgcctggctgatttgtacatggccaggtgcatacttagcaccaaactcagggacatgtcctgttacaattctgtcagagcttagacttgtcatcactgctttacaatagagctgatagccaaactccatagcaactaggacctaccatccttgccatatgtgttcatcaagtctctttagataaaattaatgacactttttacatgttcagttaatcattttaatgcattagctccatagaatataaccaaattgcttgacattttcttaacaattttcatgcctggtaccttcaagatgaaatctttcaagagagcctttgctcgtggcaagtgagtattccactccatgccccactgattctggaatgactcactgagtgacactaaagatacattcattacattagaagaaatttgcctgtggaagcattagccagtgcaaaaagcattaaaatgaaatggccacgcacacctggaaatgaatttctcatgcatgacttttcatttggaaatctgtcaccaactgtcctcagtgaactgcttgaagtgtctacaccacagtttcccaaacgaaccacacctgggaccacagagacttcaactttcagacaacatgctacttcagctctgcactcctcagcccacacccttgcttgttatttactgcactttccacatgtattttatttcatgcctgtattaatccaagtcttccctgcccccatctcagtagtaacaaaagaagctgtagaaaatcaatgagctccgagctgagaaacaggggtgagccctgtgtaccctttcgacccactgggcacaggcttgctgagtgtaacctgaagtctaataacactttccaaaccagcctgaaagtacaaatgagaactagttggttccccaagtcaaggcttaaaatgaaaaggctggtgttgtttacactggggaagaaaggctgacagacagtaatccttcaccaaggattacagaagagaaagaaagcagagtggaggttctgttttcactttcaaatcgcagaattaagtcagggaaggaggagggggtgtgtggctgggtgtctaggagggtgtagactcacatagcttcatgtgtttgtcctctgggctcagttacacacacctcaccatggctaaactgaaaggcctgtgctccgttgacagattggcagcaaccagttttcatggaccatcagcaaccatcagggacattcataagcaaccacaaggccagccttgctctgaaatggggctgacatgtctggccactcaatttttcttccagcagtggtctgaacagaatagacctagccaggctgggacaagagggggtttccaatgtcactcaatggctagcaactgacattttaaaccaagtaactaagaaggaaaatgggcaagtagcatcaggcatcctcacctatgattcaaagtggagacctggacttccctggtgagacaggcatatcaggcatgcagctgtcatgccactggaggtctgtccttctcataaggagcctgatgaaatgaccaggtgggagactatgagccctgggcagtctgctcactcctccagaggcaaagttcccatatatgtgtaacaaccttgtcttgtcggggtttctagccatcattgtcatgtgatccttgggcattagaaagtaattaagcttgagatgatatctttatgtcacacaaattacaaagggagccatactccataacccaaagccaaggaatgctgcagcaggaatgctgggtgtttctttgggaaggtggctaaagaggaccatagcaagaccaaaacatcttctcatcatgttcactctgtggaaatctccaaataacacacaaagtgaattattcatagcatgaagtgaagaatcacagagtataaactgaactgatgaaaaaaaagattaaatttgctcacaccaaggtttagggagctggtagactaggtcacatacttccatggtcttcctgtcatctcccaagatgaacaaccttccttttgggcttggtgtctaccaatttctgtcacctctcatctctagcattaacctttggttgttacatgggaacttcagttatgtggttgaagctgctttttccactctggtatctgtcggtcacctgggaactcgtgttttctctttccctgggagacaggggcatcactttacatagcgccatggctatgagatgaaataatacagcacatctatgactccaggaaagagtcctagctggacctcagccttacagagttcagcttgtagctactgtgtccccacacccatctgagtgtgtcacagtgagtttttgattgacttgaagtgacagtttttctttatccaagcagaatgcctgtcttctccaatcatttgtgattgtgtgtgatttttcttttgaaatacctatagctagcccagtctccaatactattttcctcctgcccaattttaatcagtcagcatgtgagcatttagtgggttcacattccacaatcaaagagccttaagttcaaattccaaccttgctgttcactgtcatcttcagataggcatcttcttccatgataatcatagctgtttctaaactgtaaaatgagaactgtaatgattccctcatagacagcttttgccaagacaatgagatgtcaaactgtcaaacgcagggctggagggatggatgtgtcagtaaagtgcctgctgcataagcataaagagttgaatttagaccccacccagaaccacaggcatagtggcatgcaactgagatcccaggactaaggaggtggagacacacagacacctggagtttcctggctctatcagtgagctccaagttctgggagagaccctgtctcaaaaacagtaagggaggagaaattgaggaagacacttggtattgacttctggccactacacacatccttacacatatgtgcactcatacacacatgagcacatatatacacacatgttcaacacataggtatttatctgagcatcagcaccatataccatttataatatttataattttatactaatgaattttatacactcagataaaagtgcattatactgaatacattccagtgtgtttacatatattcacatttctaatttttacagtgtacagcatttacaatagctactatcctgtagctgcccaaagaaatgagcagatataaaggatatatcatcttcctttcagagaaaaggagttctctatatgtaagttaaacaaacttcatatgttccatacagaaagacgataaattttaggactttataaagtgattctgatctttcttatggaacaaggagaggctgtatagaagacttcatcatgtagcaaacaaaagtgaacattactctactatgtatgtatatttcctatgatgagaaaatcaaaggtataggtgatacaggattgagtgcctgggagtgtttctgcaagccagaggcctaccaatgccatgtgtcttcagatcactcaaccatggaaaactctccctctaccacataaagaccagtctgtgatagtcttttctccaggaggtagaactgaattactttctcttggagaatggactgaacttaataactcacatctaacaacggtacatgagacaacaaaggtgattggagatagaggaaatccagtagacactacctcaatgaggccctcaaggtcaacatcatcagaggtgagtcatgtcacaaccatgtcccctagttgtgctgcaatgataagggcaagaaggttctcacattcatggcattatcccagaaaaaaagcataattccattttaatcacgaaagtgcaagtgacaacccctactaaaactcacccttcagaattggcaagtatgcctcacacattgacaagcaagaaaagacaaaagaatgtaactgtcatgtactatacaagactaagacaacattatcaaatgcaaaagaatgaagtagattagatcctggagcagaatagattagaaaatggatgaaatttatattttttggttgtgagtctagcctttaacagctgagccattaaatatggtgtgtgatttaggtgatggtattacactcatgtcaacttcaagtatacaatgtcaactttagactaaggtgagaaaaagggacactaaactctgtgccattgtgactcttctgttcctattggtaaaagactgttcaaggtttgaaaacaaagcagtcaggctccagagtggctttgtgtcttgtgtttatgtagcatgcagaaggccctgagtaatacctccaaaagacagaaagggaatgtgagggagggaaagaaatgggtgggaaagaagaggaaagaaaatagaaaaatcaaacaatcaataaatgttgaatagatgaaatgaatggtgataattttatgacacagtgaccctgtattgtaataatagagtaccacaggttaatattgttagtataaatcctcctacatatttataagttttatatatataattacatagtcatgagtaaaattatttaaaattttataacataattttgtatgtaacctatatccagatatatatatatatatatatatatatatatatattatatacacatgtataaacacacaacacacatacatatgtagaataccccaatttatgatgctacaatcttttaatctctgaaagtaatttctcattaaccaagaccataagtgtgagttgtggctctatatcaatgcaacacaaaatacttttccaccaccaaataaaacccagttgaccatgcacctccctctagatgaaagtacacaaacatagaacaacatgtgtttaaaggggatgaatgtgaggggcaatgccaaatcccttgaaggccaggaggccgagatggggactccagagaaaacacgtagggttggcatttagacagttgggagtttcaattctgttaactatgaaaccctgagcaagtcatttgaacctcctgaatttctgagatttaatccataaaggacagatgatactccaatcccaggatctagacagaaatgaaataaaaccatgcataaaaagcatgatgacatcctgcatggccatggcaagggggacccgtgatgtacatctcttttggtgatgcagtgtcctcagctggagtgaaagttcactgatctgtgtttggtgcttccaaccagtgaagattgcaataagtcccctgcagaactgaagtggtgttgatttgctcagaggaaagaaaagaatctaaactgctaatgtataggttctgcctaactatgtagtgaggctaccccaaaacacccagaatccattatatacatccacatcagttaccttacctatgttctagttacttgtctaattgagggttgtgtaacagacaaccctaagacttggtcacttgaaagaaaaacagaaacagaatttgtttttatttcaaatctgcaaatttggtttgggctggatggggtggtttttgtttcccatagtgttagcaggcagcccaggttagaagttgggacaatgtccaggctgggtgattcatacactgggaactgatgacagctgctaggtaggacctcagtgggaattctgccatgactgggctcccatcagtgcagtgcaattcctcaccacatggagctgcattctaagggttgcaactccaagacagagaactagatagaagacaggccttttgtgacttagagttagaacacatacaacagggcctggaggtatagctcagtggcagaacacttacacagtatggacaaggccctggtttcaatccatgacgctaccaaccatcaacaacaacaacaaaaacatctgcagaatccccttcaccatgttgttcctcccaaagtagttcaaaaggctggaagctcccagagagaaggtaaataaactcatcccagactgtgaactcatgaggtcatgaaaacataccagcctgaaaatactgctgtggctacttttgaaaacctcattctgtcacatcaaaagaataattgatactcaagttagcaaaatgaaaagggacagctggttactttcatttcatctagaaataaaaaagtagaacatagccaagtctggcaagaatggagtatctccctgattgactctccttatatcattttcagagtctctcttctctcatggtctcttcaaacacactacactctattgctgcctgaagattagccttccaccaggtctaaaactttaaccttagccttctgtataaatggcgcagtcactactctcttctcttctctccctgaggaattccatgccactaacccagtgtacccagccaccacttgcagctctttaacccagtattaaccctgaccttttggtcttcttggtccacaagaagcacatgtgaattagccagggagctgctcttagccaataaccatcccagttgaccaataaatacctcaactcccttgtcttccaggatggcataacttagcacgttctacagtcgctactccaatccccataagagaactgtgatccaaaatggtcacttggttgatgaggtagatgtgtcttcttgatgtccttttcttcccttctcacttttgtacaacccacctgatggtccctgagatcttttttatacactgctgcactcaagcacttgccttggcatttgggaggaaaaaaagagaaactggcatactttatcactccagctagttcaatgttaaacccctagggagacagaatgattggcccaatgtaagtcattttctataatcaggggagtgagtcatggaatagcagggcttcttgggtcttcccatcatcagaactcttaagtgggagccagttccagcagaaggttctgagggcagaaatgtcctcagaaacatggcagccaaattcagcaagatgcatttctagcatgcatagccagacactgctacccaaatcttatcaaaggaggtttctatgttaagagaatagtacccacccctgagaacatgcttgtactagaaatataaagcaattgccttcaaggtgcatagacacagtgacctattgtttatgtgggtgccactgtgctggatacttgacgtgtgccctctgattttatcctaacaattatacggtttaaaaagtgaacacacaaggagaatagttctttagaatagattcattttaactaacagatgcatttggcctgacactcagatcaccatctcattgcaggttattagaatgacttgttacattctgtgaaaagtctttaagaaataaaaccaaacaccaatctaatgttatctggagagctatgcatgtctgagctcaccttctttgctgtaaaacttaattccaaataaagtaacaaatttgtttggggctattgattctacaacctgttcctagaactcatttctgactaactgcctactcaaaaaaaaatagtaatgacaatacagattacaccccaccatgtgttttattattaaaaatgaggttcacaaaatggaactaggaagcccaatctgcaataattgcagcaacttgtattcactgttactgcaattcatgaagaattttgagaaacttcctcaaggtgtctctcagtagtttctggggtccaacatgaagacaaattttgtttgtctccattgtttgtctccaattccttctcctgtttctgaacatgtcagtgccaagggaagctgtttgaagaccttcccacagtggtcccagaatgataatgctgtatgtcaaggacaagcaagcccagtggtgaattctgaacacagccgaggatgctgtcaccttttcgcactctgttttctgatctcaggatgaaatcattcttctcaggcacagacatgcccaagaattcaacttctgttccaacctcaaccaagatgtcgcatgggcagtatttctccctccatctaaatagtattgatcctttgcatgtctactgagataaaggaatgacaatgtacagatgagggtaacaagaatgtctctcccatgctgccagaatcacctaaatgctatgtccagtcacttgaaaatttattgttactactcagctaaattaactataatcaaatcaaagtacccatcagaagtacaacagtgggctgtatctaagaaatgctcactaactcaccaggatggactccacagcagtagaatcaccaaaaaagctcacagaggatgaaggtgaagtgaccagaaactcatagagttgaaaatacatccccaatgcactcaagcacatctaaaagttacatggaaagtctgaagacacctggtattgaaacaaaagacagctcttacgtgataggtaacaatcaaacttaagaaatggaattacaagtgataccaagctctgcatacagaaactgccatttgatgtttaaaagaatgatttttccatgcacacactgctgaatgtacagatgtaccttccagatgtagccacttctcagaaagaaactcactgattatccttgaaaatatgggcactaacagatcataaaaagaaaagccttccaatttctcaatgacagtctctacactcaatgaacactcaacacctttgctaaatttccaccgaagggccttccagcctggtgaagttaagcattcacagttgtgaaaatacgatgggtgtctaatgttagttgtacctttcagaaacactctcaaagctaatatacattgagcttattgtaccaacactaaagtaagctaattctcatttactccttataaacatcttataaggaaggttttattatcattgggaatctgatttcagaaagattagttgatttgttcagcatgctataggagaaacctttgtagaattgcatggccaacccttggtgctacgaaatatagtaaagctgtgacataaaagagatgaccactaactacatgagggccactgttgtggtttgatcatgaactgttccccatgggctcatgtgttccccaggagatgctactgtttgaagaggttgtggacatttgagatgtaggacctagttggtcattaccaatagtctttgaagttatagacctgttccaacacaagtacctactatctgtctaccatgtgactggcagcctccagcttctattgccatgcatttcccaccataattgattatactccatgagtcacaatgaacctctctttccttaagttgtttctgtcatggtgatgaaaaaaaaaagtaactaatatagccaccattctccctcttctattcatttctttccccaacatctgaggaggggaggaaggggccccattctcatttaggtcaatgcttaggattctacttatatttcttatattactacacaagaagccattatgactgacagttcccactacttcacaaaaggaaaagtagatttacagaaggtaaatattatatccatgcacatctgattagtgccaagctggcataagaacccacatctaatgtcaaagaccaactcttttcccattgactaggcaactaacttctcagattctctggattggggtttatatgaggtcagaagccctttggagtgcctaagggcatgtaataaatatgacttatgagaacaataattctcatcaaagaacctcacaaaaatgagagaagagatcaggaaattctcattcctcctgacccccctcaatccccaaaattgtgtttcttagcttaaaaacaaaacaaatgtgctgctatttcccgagctctaaactcagtcaggcataaataatgttcctagcccggcctgtgctgttcgcagtaagagcaccccttcacttctctctctcttcacacccacctctgactccaaactaagtcttcaggcctcttacagaggctttggtgttgcctaggaaacctggaaaaataagaaaatggtagtttcactctagcctggtgtaaagtttgaataagatactacatcttaaaaattgattttgtatactcctagggccaacttcctgggattagatatttctttttaacacatcatgtgttctgcaggcttctcagatagccacaaaagtatagaaaacagagagcatggctgaactgagccataattcagaagccaggtaataggtgaaagatgttaaccctaggtgagtggagctcacagaaatggatcctgactccccgtgggtatcaagagcatggcatcctgaatatttatggtggaatatgggacatacatggtaggaaacaaactcagcaggagctgatccaccctaacagctggggatcatttggggtgttaagatgaagttttaagggacaccatttagataaaaatcctatttgaaaagagttatgagtatgttccaaatgccatcaaggacagagtgatactgaatttcacatgctctgtgaacatctgcttgcttttaaacttgacttatcttgtaccataaaataggattcagtttcaaaaatctcccatatttttatgctagagtgacccagatacagaggtttatgaaaatgttgaaaagaaaaatagcctatgtagttacatgaatatgtcataacctgacttttcaaacagcattgattgaaaagtgtcatatggacagtggctaattatgtgaattctggagccagattccagcagttctacaattccctacaggctgtgaggccttggagaagttccttaacttccctgagcttcaggtttcaagtgaaaaatgtcttatcagagcctcccttacattggtgaggagaattaaatgagtttttcctgacccataacaagtgctgtgatagtatgaacttccatcactctcattcaatttttatttcattggaatgctttggtaaagaattcaagataggtatcatgtctttatatcaaacaagtatttgaagccaggcattggtggtgcctttaatcccagcactcgggaggcagaggcaggcagatctctgtaagttcaaggtcagcctggtctctagagagagtgccaagataggctccaaagctacacagagaaaccctgtctcggaaaaaaaaaagtatttgttaatgttgttgtttaacatttaaaagataggtctgagaaggtggctcagtcaataaagggccacctgtgcaagcatgaggacatgagtgcagacccccagcacctatgtaaaactccaggtgccatggtgtagccctgtaatcccagtacttgaggggcacaggtccggggatccctggggtgtggaggccagccagtccagccaatcaatgagctttggggaagtgagaaaccctacaccagaaaatgaggctgaaaagtaatggaggaagatgccagatgacagactctgactcacacgagagtgcatgcacacacatgcacatgtgcacacacagaaacagacagacagacagacagacatatgcatacattgcacaaagtactgtatcaaattctatatgcataggtactttagtggaaatactagctagctaaaccctcttttagcatgtatacacaaccttgctttggtcatcaggtctagtcattgagctccagtcactgagtggtgctcaaaagaatttgatgagtccccaacaaaagtaagtaattgctactcactaccaaatttcctcactcatttcatgtccacgtctccactttctcttgatctactgcttcagttcactttgtgttctcatcattcacatggtacaggctgaaataatctgatgccacttgaaaagaaacatttttttccttctcttctaattttgctatttattatcttactcatttatccaaaaagaagacaagctaaagcaagtgatagtgccattaagctgggtcctggttgcttaacgatttttattattgatatagtttgttgatttgagctcactacagtctccaaatatcatggggatcattattatctccacaaagacctttctgagatatgcctgcaagctgccacatgggtttctgaaacccaggtggttgcaagaatgaagaactttgccttgctcccaacagtccatctgctttgtcaccagagggaaaatgcaaatgtcatgatgtggcttccctgcaaaaccctttactaattgtccaatcaccctaagataaagaacaaattgatacccaaaagtttagcttgtgtgattctggggctgtctcccactgtgttccctggatccccctccacagttcagcaacactgcccttcataaagctacaactggccaccctccttgctcactgtgaggagcaagatataggtccatgcctgaaagagaagagtcttccacctctcccacaagataaattcctaaatacattgttgtttctatctagtgtgaggtgcaactcatttttctgttaataagcattgttctgaggagtaagactgagtgggagacaaagatccacatgccagtctggagctctccaccctgggctcagaggagaaaactgccagggccagcctggcagttctattatgttaagcaatatattttggggtatggaagaaggagacagagacagagacacagagacacagagacacagaggggcatgacctgtggagagaggcagatctgttgggctctagtttgaatctctctctgatttttttctggtaattgcacaaggcaaattcttaggtctggtgagagtttattaaaagggtttagttttagaacacaaaatccattgcctggtctaccctgtgagccacactgtgctacatcacacagtcactaccttatacataaagtgtttgggaatttcaaaaattgtcactgccagttcaaaatatagttgttaagccccaagtaaaaaagaccaatgttgttattgatctatttttttttgttcagaattaccctgtctttggtgaaagaggaacctctgcaccctaaaaaggataagcccaactgtgtagaaacccaagatagcaaatgacacctttcatgtttagtctggaaatgtttggagatggctgcagtttggtgctccaatgagctacccagctatctgccctggaatcaagtcttgccaatgtcaggatcacacttttcctcattaccttctacataacttcttggtgttctaatctattcctaatacctcctccaagggaaagcttactcactctgaagacaacagatcattgagtgatggcacttcacatttttaaaaataatttcagttctcagaaatcaagatgtggctgtctaacagtggcactttctaacatcagtgccaggtgagtactgtgacatctccaatcttgccagtatgtgcatgaatgtataccaggcttggtacatgatttcacaaacgagttcttgccttttcaggcaatgaacttcctgagaacaacataaagaagaacatttgtcctagttgatgtcttaaaactattgttgctatctgcccatagtaccaagaaagtgccagccttgccatctctgaaaactgcgatgagctcctgggaaaaaaacttcacaggcaatagagaggtcttaaaaagggctatttccctagcaatttcaatggctagaaagtgggttccgaaaaccatggtcactaatcagtcttcagtcagagtaatccaagagctttgctttcaaattggaaaagctttcagaaatgccttcttcaacttatatttccctttttatgcatgcataagagtgatttttaaaaagtatgcagcagagagtttaaaatgaattctttccataggaatgaaatcaatgtataaatgataagaacacataaagatataatttaaaattaattggcgaggttttctgtttcttagcagtatagtcattcaccatactaagatgtttcagtcaacaacaggccatgtaaacagcaggggtcccataggattaaattgcttggtaatgtcacagtcatcttcatccttgtatgaccaaattatgatatgatagctacacaatagcaaaagttgtcctatggtgtttcgcaggatatattcccatcattaagagatgcatggttgtgtgtaagatagggacatgacttacatgcaagagagttttatagaaatacaccgtatttcttttatggttgcctggatgttccttcactgatttatctcaaatataactctgccgttgtaattatttgcttaatgtttttccaacttctgtatcaatccagaattgatgccttgaataaaataaacattctttaattgtattagtgaataggtgataactaacacatgagtattaattaatgaagagtgagtgactaaagtgtggatagaatttggttcctgggtgcccagacatcacctggcatcttacatgtctactcccagatttctagggctagatctacaggcagagcatggctccatttgtgtgttacctgattgtcacaggtttcctaaacaaacaaacaaaaaaccaagaaacctttaaaaccaacaattaacaaaactgaatgcctctaggtgggtcatgagtcttctgacttacaatcctatcacttattttgatctacaccctttattaggccttgcaggctttcagtttttgatgtctgctctgtgattttacactaatactcaacaatcccattctttgtgtagctgagggatggtgactgactactgggaaagccctacccatgaaacacctattgtagagaaatctaatgatcagatttgccaggctgcacagtcgtctggttgataattcctcaccacatcacttttggactacaacatgtgggcggcaatgccagctgctgtccacaggtggcagtggtccttcactgtggcaaaagcctgaaaggccaatgctgcctctaggtcccagtcctggagcaggaaatgacacctgtgttggagctgtctgacttcatcacccaccttttcttgactggtgctcgcatgcaatgtttagatgagaggatcaactcgggctcctgtgctgctcctgtgcttacaatgggaaagatagaggtgtcttgcaactgaaaagatggtccctgggttacttaaacggaataaacttttcactatttcagtttaagttcaagaggaatagagcaggaggaaaagctgatattactgctcattttacacccttccaaattttatctctcttttagtattgtcctaatgggcttgtatatctcaaacatgaatccccagtaccctggattacaaaattaaaacttttaaaacatgtattttcatttttaataccattttatgcatgtagagacataagggagagctcagttccaaaggagctaaaattaaacagtattttacctctagctaattttttcaggtaacagcattgcctagatatgcatctaaaaacaagaatttgggttgtggttggtttttttttttttatcttctgctatttaaatctaggctgcatttgttttgtttgtaattcattccaaagtaatgtaagaacagtcccatactgtcaatattcctttacaacatatggcaaggttttagatgcttttctgttggactatgatgtcacttacatcaaccagtaagtcacagcagatcattttcaagggaccaaattcccctgagaaaggtactcttactgaatgtatggccattagcaggagtgttgttaatgatgctttaaatatttcctcccaagaggaataaaacagccatagaagcgcatttgccagcaatgcattcttcttcaagctacgtaacccaggaaattctcaagaaaagtgtaacttttacaaagcatgtaaccattgaataaaagcaatgctgccttagatgggccacatagaagtaaaaggacacctgcaaatttgtacctgtgtttattggccaggaaaagcccactcaagacaaataaatccatttagaatttaaaacaaaatacagtatgttgaagaatagatatgaacgatcttagttttctcctctataggatgcttatttcctcatcaatatcactcaaaaataaagcaaccagtgtgtggcttctcttgctttggctgggtggcttttctcactgaagccacatacgtcttgtgcctagatactcagttacaaacatcacacaagctaaaagttatgcaggaacccctcttctctgttgttgctttttcttttgactcttccttttacccacctttgcccagggttagtggagtaccaccagcttgtccatcttctatagactcaaacaatagctcagtctacagttggtcatagggattaacaaagtatcaagtggtcttgtaaccacggcactgaggttagacttgggccctagaccctgagaaaatacccgtaaagctacactgtgtggaagggctatgaaggtgtgattcccctcaactgattaagagcagagatctttcatattgttcaatatcatcacttggatccccaaggggttagccaaacctgatgaatctgaaccactctcagcagagccagagtatcattggaaagaaacagggaaccaagaacaaggcaccatacttactgagtccctaaaaagcaaggctctttaacgtgcatcatcctgatgaattctaagaactctccatgctagaagtttaatgagagcctcctcatagataagaaaatcaggatccacgggctaacttacttgccactccctccagcatattaacctaggtccatatgcttctgaatgctggagtctttttactactcgcttctaataccccctgtagctggtttcttgaaaacaaacaagcaaaaaccctttaatccctgatttggaaatggccttcctgggaccaagcatggaagattgagcctatgaaacattctctcccattcttctctagaggatcttgagggatgagaggagcttaacaacagctagggttttggacaaaacaaatacttttatgataattatcattttccttgagttcagtgataggagtccttgactttagcataaagggaattctttccaggttataatgcttgatttcagcaccagtgatatgaatcatatagagtctcaaataattagagatacttaaaaaccaatctgtacttaaccacattatctgcctggtgtctatagcaaacaagttgagcaggagggtgaattttcccctagagatagatagctcaggatgtcaccatagcatagactgaaattctttcagcttccacaatgtggccagtgtggaattgcaatgaaatgaagagatgcggaattacaaagaatctaagcttttctcctgagagtcctggatagccaaggtaccatgcatggtttgtgctagtgagcatagaacaaaccattgaactttcaaagagaatttcagattgacagctgccaaggggatggggcctatgtgttaagtcttttagacacagcaattaaactagacattgtcagatttctagactcttctgcttgcttggcttaggtttgatatcaaaatcttccttattctatttgaacaaggtttcccactgctagaaagctccctagcacagtgtctgcctttctcttcctttactcaagaaagatggacatgtgagaagcaacgaaatactgatggaagccctccatgatgcctttgcacactccaaaggaagttaaccctgctgaggcctgcttttagagcccttgagattttcacagaccgagggacttttgttttttgctattgttgttgtttactgattttgaaaatcaaaaaacaaaaaaaacatgaattttaaaggaacatctaaaaataaagaaaaagaaaagagaaaagaatatctgtgagaaagttgcaaactgatgactgtactaaactttaaggacttagaattctgtcagtaaactatataccaacattaacggccacaaacccctccatattctgtctttacatgtatacgggatattgacagacctgccagtgttcatcagctctgctttccttattatccttttattagcctccaacaatacccgtgaaagaaaaatcatttctataacaacacttgctttgcggttacctgcctatcatttgttatttcagagaacagccttgtaaactaaaagtacgttacactcccacggaacactcagaagcctagctccagatcaatttccacttgttgatagtgtggacaagctgccttaattcaatatttttaaagaaccctacttcaatgagatcatgaaccaaaactttttatgaccacaaacatgttatgtttcctggtaggttaaaaagagccttggagtctgagaatggaaaccaccatggtttacctacaactttaaagactgcattcttcctagataatgacttaggagtcaaagtacttttttctggtcctcagtatttctgtctaaaagaagcaaaaaacaaaaaacaaaaaaaaaaccaaagaggtctgaggacctttgagcttcggtgtgcttgttttagcacactaaaacaagggttaaaaaaatacataaaatgtgaagcacaatttagcacagatttaaagacttagaactaatgtttcttggtaaggatcatccctacgtggtaagtaaagccaagctaagatgcaagtgaaagaaaacagaggcataactgctttttacatcctgtggggttccctggaaattcacagtacctatggaagtaagggcatgtatacttccctgtttcctccagctaacgtcccaagtgaaccccagatttgactgccttggccttctatctccagaagtgctaacagatcatgtgtatgaagacggatacttggattctcagactcgatctatgcttggagaggccttttccaggccaggtgatcaggggacccacccagttcagcagaaggacagcacaaccctggctctcttcatgtgaggaaatgctgggaaaatggactttggggaactcatcattcctcacactcaggacttggttacccatactcctttttggcatactcccagtggagacacccagtgtcgagtacccacctagtacaagtatttaggaatgtaactcagtcaggttaactgtcaacaaggccagatgaaaggaagccagggaactggaaataaccaggaggaaggggagtttactctaaacttgccaaggtttagagcgcagaaatagtcatgttaattaataggtgttttctgttaacacatttgagtgtttcccaacctaggaaacttctgagaagtatgactgaagggtagtgattccccagataaaatgaacagcctatttctttctgcagagctaaacttcagtggaatataaccaggtttcagttgctactttaccaacactctggatccacctctgtctgtgcccattgccaccatgtcccagtatgggaatgctgaggtgtgtgtgatccaacagaagtgaagagtggagctagagcttggttcccaatcaactgtcgtgtcaggaagtctgtgatacagtatatcatgcttcaccaggatttactcagcagcatctaaatggccctcaggggcaggctctgtgttagcccctaataaaagagaacttgaggaaagatagtccttccagaatatccaaagatactcatggtgaatgtcatgacaaagtgcctcccaaaggcacaaaacctctacccccacctgctgaaattgggaaaaatacaatgggaaaatatgtgttccaaggcatattataaagataagcaggcatatgtctaacagactggtgtggagatgtaaagagtgtcagagaagccttaagaaagtaggtcagtagataagaaagaaagtcaggttcccagaggacagggttcggagagtagttgctaatgttaatagatagccaagacaggaacatccatcagaattcaaacctttgctagtggagggctccacatgtcctcacattgcaacagctgtactagaaccactttataaatagatagaacacacagcaaaacccaggccagtggcttggtggaaggtggaggagcttctggagaagagaaatgggtacctttctatagaagcttctgatgggagaggaaagagctggagtagtctaatagaaaggcttgaacattacagtttaaggtgccctggtagggttggcaggctggctcccttcagagtgaagacccatacttcctgacacacactgcatctctgactgtctttccaggctctggcatggataaatgaagctgtcctgtcattttaaacggcatggaatcaatttatttcacctaactcaagttttacatggagtcatgctgctactgatgatttgctctaccctggggcatatgagcaggcagtggtgggcagcacctgtggtgccacacagccatctgggcatgttcccctgtctattgctctcaaacacatcaccatatactggaaattagagggagacaccctcaagttcacacaataaaacccaaggcatacagtgttgtaactctaataactcatttgaacatttgttacatgataagaaagcttatcaaacattccaggacaatcaatgactatactctgtgtttaaaggcacctgaagatttcatgacaacaaagaacagaaacatggcaccattcccaaattgctaggaatctgaagctccatgaggctctgaaaaaacgtcaatagaatgacatttctagggatagaaaatggcacatccccaaacttctacatacttcacaccttacttgtcttgggaaataattaaagaatttgtgggctgtgccttctagtttttaatattatactaatttgacttctttatcaaattagttttgatctcattgtatcaacccaatgttcaccccaatgtgtaacactgattctttaaaggatgtgtgccttaattgaaagactgagcttgcctcaattcttaaaataatgtataatgtatggtatatttccagcattagaaccaattggcataacaccaaaagctaaatagaagagctccaccagccttactgaaaaatttcctatcctcaagaaaactaaaatatcatattgcctggctatgatgacaatgtcctgaatcctgactctaaatatttatttcctaattataacctttgtaactcatccctgtagtgattcctgagggctcgtcgtgaatagaacaccggcacacattcacattgaggtttacaactgtgaaatccatacaaatccccaatgccatatgacccagtgtggacataggtctgtattcaaaagtcagtcagcccagaatccaaaaataattgcagagttatatgcagtagcttcagaaatgtcaaaggaattcactcataatggaagaccaaattcttagaatcttctttccatgtctccttatcctgcactgaatggacttgtccctgagaaggtttcttcacactctgtcaggggtgttcaatcttctgacattgcaacacaatcatctacaaagtccatgcttgagagccatgtaatcaagttacaaaacaaaattgcaaaaaaaaattatctcataatgttttaagtaaatttatgatttttctcttgggctggattcatagccattcttggccacatgcagtctttgggtcacaggttggacacatctttaacttcctccaattgggccatactggctttgatagatttcttcctttcaccctttcagaattttcctctgggtgtctgtctcagtctctgtgtctctgtctgtgtgcctctctctctctctctctctctctctctctctctctctctctctctctctctctctctcatgtgtgtaagaaaggggggattaaaatgatttaagtttttaaatttattttaattgcttcaaaattttatgcttgcataaattttatagttttatacttttgatcaaattttataatttttagcaaatccaccaccacctactcccctgcccaattccttccctatcttctccattgcttttccttcccatcttcatttttcttaaacccactgagtccacttagtgctgcctctatgtgctatgggcacaggaatagaaatgtttattggagtgtgaacaatgtttcaaggaccacatgcctgaagtaaacaggcctttcctcctccaatagccatcactcgtcaccagcttctcacctaggggtgacttcacggacctctcccttgtccatgttggggtttagttgggcttgatcatgggcaggtcttgtgcatgtagtcacaactattgcaaattcctagctgcaaaggccctgctgtgtccagtgcataggattttatagcagaagtctactccctgtggctcttacagtctatgcccatccttctgctgtggcccctgggcttctctctcgaggatttctaatcaaaatattctaccccgatacttccctttatttgttaccaagaacctgtacaacaaaacccagaaactcagcagaaaataaaattatcttcctggcacatagaagggaagagagatctattattttcttgctatcatgggatgatgtctttctagaataatgataaaatgcttgagagcagaactctcatcctgtcacttaggggaaaatttttttttaaaaaaagacatattctagggtgtgatttcctatccaaaatgtggccaaattcttgggattttgtggccatgaaaaatataaggtttttttaaaccagtagtgtcaactcctgccacaggacctggacttcactgtgttgactgttaataggctttaagaaaaaggttgtaacttctccttcctggatgaacactaaggggtttactcagatatccccatgctacgtaatttttctttgtcatgtcctatctgccctgatggtagctttgtgggattctcaggggcaaggggagtaccccacatacagaagtcacccttctattctgtggtatatgtgaagaggtagagccatttcttgagttggaagtgtttctgtgaaagacagggttggagacttttgagccccacatggagaatgtttgtacaatatgccactcaatttaggcaatacttcaaaatcattacttgcagatagatgacacaattctggctcagttgggactttgatttttcaaatgccttatgaaagacatctttttctgtcacatatttaaggttaacaaatagctagaagcagaaaattgtttcattcagaactatttttgtttaaggattattttttggttttaaaagatcttttttctttttcatttcattaatttatttttatggaaaatagactgttttctcatataatatatccagattatgaccctcctctattcttcccatttcctccccagctaacctccctctggatctactccctttctgtctcacattggaaaagaactggcttctaagagagaatagccaaacaagacaaaataaaatataataagatgagccaaaaactttcatattgaagttaaacacagcaacccaacagaaggaaaagagtctcaagagcaggcaaaagagtctgagacctacttgttctcataatcaagaattctacaaaattactaagctaatagctataacaatataaacaaaggacctggtgtagacccatgtaggccttgtgcttgctgcttcagactccaggagctcatatgcaccttgcttagctgtttcagagggccttgtttttccactgtcctctatctcctctgatacttgcaatctttctgtctcctcttccacaggattccctgaggacagagatttgaagagatctctaatttagatgctctctctctctctctctctctctctctctctctctctctccctttccatccctccctccctcccaccttccttccctccttccactgtatctgcgtgtgggtctctgcatctgttcccatctgatgatgactggataaggcacctatctatgaccatagcagactaccattggaaatcattctgttgattgttttttagaccagtcacatttggctaagccttaggtctctgggctatctagactctggttcttggttatgcaagtagtgtcaggtatgggttacttctcatggagtgggccttaagtcaaatcagatattggttggctactgccaaagttctatgccatcatttccctagcatatttttcagctggacatattataggtcaaaggttttgtgagtgttttggcctgcagagtaccttcccaccccaaagatactagattgtagagggtaaaggctccatgtaggtaccagtttgagttctcagtgttcatcaggtcatatgtatgttgttctccgcaaaggggctcctcatttgttttgaacagagaaactctaagttgttgttattgtcttgcttgaagatgaaggccctcatcataataactcaaactagcagagtcagatggccaactctggcattacaatccagcactccaatcgcaaaggctgaagtagagtatttttctaaccagggataaactagcagagtctcctgctttgggagacaaggtacatatgtggaaaaacaaacaggggctcaggggtaaggacgtgttttgacagtatcacttctttcagggcataacgcccagtgtgcttatcttgtgctgaaggaattatctactcactggcattctctttcctgctcccccaggtatgctactaaagggacttctaattccaaaggcagattattagtggacctaggagcatcttgtaatactgggacaggaatatatcacactgggattcatctactcattcagcactatgggaagtacagtgtgcctcttgatgggcctatttgtctactctttccttattaactgcatacttggcaatgctaaagagaccattgtgatcccggatctcttggtaaataggacaaatagacctaaatagtaaacaaataaagaaaaacaataattgaattgctaattctatgtgctatgaaagaaagcatataatgaagagccctaccacaagtcagggggccaggagggtccttttccagagatggaggtcccttccctgtgctatttgttcaaaaacttgaggcaccagaaacctaagaataataattttgttttctgaggaacaatagctacaacaacaacagatgtaggctccattcccatctccctgatccatctccagaaaagggtcatccaagcttggcttacaaatctttctttcaggggatattgaaagccaacttaaaaatttgctatctatatcatttactatccttaggaaaataatatattttactatccttagggaaataatatggaatcttcacatctaaactccaaatctggttgcagtcatggtatctctggacaattctcttagttcagttatgccagcttcaaccagctactctggaagccaaactcactcgtaaggttgcagaaccctgagattctgaagaccagtattaagttgttattcttaaaaccattcttgcccacctatacctcttgctctcaacttcctccagtcttctacctttgacatcttcctaatgtgtcccccgctgtgttatgaccacctgccaccttgtggaggcagtcatctgaagggttcatggagatggaaacaacaggggtgggggaaacatgcattctagtttagtcaagatttaggtggatcttcactccctttgccaggtagaaaatgtgacattttgagtaaaggaaactagtcttttagcaaacaatggaaacaatttcagcccaacacaaagatattgatcaaactataaaagaggtattagttttatttactaaacaccttgttgctgggctgggcagcagccagtcggaactacaaaagatctgagctcaactggtttgcatattacccttggaggggaatcatagtttctcccatctgctcagtctgtaaatatttactcagtatttcagcacacttcaaattcaagaattcagttgtctctttacttgttcctcaacactgaacagacaaaccaaggtctgaagatggaggtgctagcatttgcttgacacagtcactgaacctggattacatattaaatgagaaatgctcttcttgagccaagttcacagtgaagtaaagaacaagtgaccttcgcggccaatgatgcatccaataaactggctggaattctgccctgtttgcacacggaatcagaaaataaaataaaatacaaagaatgcatcccattcttctaatttctgcatcttgccttggccactctccccagagctttgctctaacccagttgccaaggaggcttgaggggatagcctctctgacacaccattaaggatcctgcaggccctcctggggatattccaaaagcattctgtagggaaactggctccttctccaggctcatcatatggaaagtatatttctctacacagctggcaaacaaatctctttgaaggagatagccaagaggccgaggttggccctcatgtaatgagttcagcatctctccctctccccagcctataatattcttcctcccttgtagttatttattattcaatatttatacaagctataaatgtgcagagcactgcacaatatcacagagaaggccagtgcattagcaacaccttctcctgagaaatagaaaggcgcccacatgtaaagcccacaggcaggagctgccaagtgagagactggtggatggctccagtcattcagtgtcaggggcacaccttgggtaccagagctcccctacctggcagtgatttcaagaaggaagtggctctgcctcctctctgtgcctctggcttcttccacacttgttttgtaaacaaaagcagacatagcagcctggaattaagacatgcaccataaaccacaactcctatttccaggcttgatctaaggcaatggaagctattctaagaggaaaactatatcaatctgtgttcctaaacatggggtatataagctatggaataccccatcaatatttcctataacctacttaaagatagactgtcctgatactctgcagcaaggatttgagtggtgcatctgctaatcaggaaacaagtgtaataaaaagccatggaagaacatccaaggtcacatcaccaggaaatgacagagctgaggtccaacacctagtcccctaatctaagactgcaattctctcaggactgagttgttgcctctccctggtcctttcttggttgctctgggctttggttcttcatcaactattttctctgaatatctatttatctttcaccttaaactcttggcatccctcagcgtcttagcttctttatttttctctagggatcctttgtcttttgtttgtttgtttctatataattcctctgaaattctaaccatagtctctcaagttgcaaccattagccctttatagtgaaaccaattacctctccaagcctatactgaggagaaggaaaaggttacaaactttagagtcaggctaccctagggcaaaatatcagtactgctacttaccatctgtgagaccgtgttaagctctgtagaactatagctcatctgtagtatgaaggaaagacttccatatgcagccaaatggccactctcccccaatgtctaggggactctcttgcttctgttcctctggagaccttgactaatacagtagtgaacttgctcaccagaagtctgtcacaacatctccactctatagaatctccacacatcttctggatctaaggtcctttccatttccaaatatcatctgcagagttgatctttgtattcaaaacgcatttgctcttgagatctgttgctgtgtctaaatactaggcatcatccctagaaaattccagtatgaatttcataatcattgccctcttcatcccaacccagaattagtcccctttgaacaccaaaaccctgctccacttcactataagaaaagagcagaaacaacatctttggtaggagtgttctattcctagtaaatagaggagatctggacccagcaaatgctcaaccacatagtggttgaataacaaactgtatcctactgtacatcattgctctcccttgtcttctgaacattgattatcacctaccttatactattgctgtgtctgttcctgtttccatcccataataatggataagaatatattagtaagctaatctttacttctctggtatatgttttaaaaacactttaaaagctggagaaacagctctggtggtagagtgcttagcatgcacaaagccctgggtttgactgcagttctttcataaaatggatacggtaattcacagcagtactgagggtgtagagacaggaggatcagaacttcaaggtcccacctggctatatgacaagtttgagtcctgactgggcttctggaaaccctgtctaaaaccaacagaagcaaaataatacaaaaattgaaatgctaggttcatgaaaactatttgcaacattgaacagtgaaatgcatttactcctttggtcaaaagaaagatttgaatccaataaggaacacataatttccttcacaaaggtaaaaaattaacacttggaaagtttcttctgtacattaaaaatgtgtgtaacattcatagaaccaaatttatgttatttacagtccttgattgtaatattttaaattgtgattacgatttccacattgtggaatgcctattgttctctttaccataaaaaataagatagccttgaacctcaaaacatagaagtaactaactaaatattctattaccagagaagcaatcttgttttgatgctaattcatctctttgggaaagactattcttaaaattaatgcaagattgatttggaggtatcttattatgcctgaatagttaaaagatgattatgaaacaatcactgctttgaatattcagttttaaaaactttcatagaaacaaataaattaaaaaaaaaaacagtaatttcccgggcctttgataatagagtgtggagtcaaactaaaagttcaggttttgctttaaggacagagaaacattttttgcagggaaaactgaattgctacaagaaagaatcaaagtagaacacctgtcgcttgagaaagaggcttaggagttgaaagtagaagagaagtgaggggagaggaagagggccagcaggagatgaggagaggacagaagagagtcatgcaatggttatgataaaaatacagggtattcttgcgtgagaacagccttaggaagactactgtttataggagtatattctaataaaaaactaagcatcagacagatatggtgggacaggcctataatcacagcactcaggagctgatgtaagaagattgccataaattcaaggtcaggctgaacttcatagggagcctctggcctgcctgggccacattgtgaggccctatctcaaaataaataaataaataaataaataaataaataaataaataaataaatggaatttacactaatgattcaagatgtagttaagaaatatgaagactatttctccaatactcgtgtacctgactaaaccgcacatgtacacacttttcaatccttcaacagaattctagagtttcttttccttgatctacccaacactctgctccctgtctcaccatctatccttggaccttccatactggggttaatagttccttgggtggcctcacttccctcctaggcccagatagcactctccacgtctgcttcaagcctgctggttccaggcaaactgcaatcctggcagggcctgatgctgggaggtacaatggcattcattctcccaagcaagtcagataagatctgctgccaaccatcctggctgtctgtctgcaatgcttgaagggtgaggggaagcccatctgggttttcattttatcattgctgccgctaaggctcatcttttgattgcagccagagcctcgtaatgggcctgttaaaaggtatttttggtgcatcagccttggttgtatgaaactattctgaacttaataggatgcctttctcctctgcctatccaatccagaaaggcttcagacatcacaaccactgacaacggcctccacacgcctccaagccctccatgtgaatgtggtagcccctgtgactaggctttctgttggtacaaaggtaaaactgagaacagatgaaccttagcacaccacaggaatagtgagctacgtatttaaactgtggttctgtgctgctggtgtctatatagcaggattggctaagggaatgtgtcattttactactctgagctatggaagacatggctcagtactgttcacactccacaaaaaaagaaaatcaaaggcaaatatcatctccccttatgaacagatttactgcttcgtaaacctcagaagggcaggtggagtgtgctcttactcttacagacaaatcaagagaagctaaccgtccccaccttgcccctgcatcccccatcgccaaaaccatgcagagagactgccttccactacatgtgagttatttgcattagcatgggtcattttgacagcggcagaaagaaagggcttatttatgggaagtccacactgaagactggatttgcaagaatatgcttgttagtgttacactcctccttggagacaaaggggtgtatcctgaggtttaagacttaatgagaatttttgcagaccagaccaaatcatggccacagaagataaattataggcaattaggtctgcatttgatccattttccagcatgctaagcttcactcgaaacctgtattcagatgcgtgttttgctgcaaaaactaagtgtgctttgcctctgagaacatagttcattgggaatgaaatatctcgccgttgatacccagaactctggccataaacaagctcagattatgtttgagggcagcagggtattgggttactgagtccttccggagcacatttgtcacaaccccattgaaattcagctgggctggcagaggagctctcatttgcaaagaagaaatgtgagggttatgccagtggccagggctgcagagctagcaggtgtttgttgtgattaccagacactggctctaagcctggctaagcctggctgcattgaaattacctggaaacaccactgaaaatacaaatttcctggattctacttgctagaggctaaactggatctccccccaatcccaaataccttagtagtttaggatgtgactgaatttttagacaaggcctttaaggagatacttaatgttaaaggggggaggggctcacaggaatggaccctaaactaatatgagtgcagaagggagtctgtctgaagtcagaaaggagaagacaactgtctacaagccgaggagtgagacctcaaaagaaaccaaccctgtcccatatgttaagcttagacttctggtttccagaacaacaagggaataaaaatctgttgtttaagccacccagtctgtggtattttgttatccatgctggctgactaatataccctctatacaagatgaacagattctttagaagtccgaagcagggatgagtctggcataccatagttgaaaaccaacaatgtggactttatccaaagaacaaaacagtttcattcagtggcttatcaccttgacctgctctgactgtgaccaagggttagacccgcacttgccacagaaacactgtgtttgctcacaacaaagtcaagtttccttccttataattggctcccaagaaagtcattgccacattttggttctaaatttatcaaaggaacttctgaattgcttctaccaaggcatttgaaagacagcgcaaatagggtacttttaaatcatgcagaaatctatttcctgaaagaaaaatgcagggagataaaaggatcaagtcaagactactgaaattctggacagtgattaagaaaaaagagggataaaggagctcattggctcatgaagtatgtgtttaagaaaggggcagttgacagaacatcatgatagattagtctgttttgagttgctataatgaaatgtcagatgttaagtaatccaaaaagaaatgtggtttagttagcttctagttcaagaattccaagaataagatattggcatcctgatggggatccctatgattgtgtcatacaatcacagaaaaggacgaagaaagaaggccacgtgcaaaagaccagggagggggtggtttaaagaggaggcaggaagcatggggactcagacaggaactcaggaagcaggaggactaagacaggaagcacagggactcagacaggaatcacatggattcagacaggaaggaggaagcaggggggctcacacaggaagcacggggatttagagggtagggctgttgtttagttgttgcttttgtgtgtcttttgtttgaaataactatgcagtctcacaaaaaatgaattaatgaaccagaaaagctatattaatccctttagaggtacagtcataaacaattgcccctgcactaggccttatgtcttaaaagatccaccattaccacactggaggaacataatgtattcatctcttttgacttgaaatggcaaaatcatcactttagtatgtgaacttgtggatgataaactcagaccatattcaaaccatagtgcacagactaccaactctaaaaattccagcacacttgggagcttaaggatagggtcatcccgcaactcctctcctggggattatcatgcattccctgtttaggatcacaaggtggcagtgctcaggagcttacacttgaatatctgctccgtgataactgatgtcatgcaggtagccctcaggaccagggttcctaaggctccagaattcatctatgtgtaccattccattttcacaatagtcagacacccaagcctaataggaaattatgaaggaccttctgcaaccatcatttaaattatgcagttggttctttaacatcatgtttcatgactagagctctccatgcctcatgatttgcaactttgcattttatttgcctagaagcaaatctgatcaataatctctcctatgtgggcacaggtacaaatatttctgtggcccagtcctaatgtaatcatcaccatctaaaaacttatcaggcaatgaatttcctggtcatgtattcatttattaattcaataaatatttaatgagtacatgttacatccaggcctattgcaagtactggagatgtagtactaaacatagatgactacattcctgccctcgctgcttttaattcatgtagtgaaaatagctgatgggtaaaaggatacagtcatctgaaaatgtgttaggaaagcaaattctcaggcctcacttagcacttttttttccacttaatactttttgagtcatatattctagaggtgggacatagcagtttgatacatgccaaggtctggaaaccacagttgcagttgagagtgatgaaaggaatggctgattaggcacaatctcaaagagaagatgacatccaagataagacctgaatgccacttgagctagaaacatatactgagctaaattctcatcatagtcccttaagctccccttaagccttgggtcatttccgtgttcaccaaacactgttgtacttttccatcatgactgtttttatgtcctgtgaatttacccatgcccctgttcccaaagatgcctagactaagctcaatgctctgggtttttttgttttgatttgttttgttttgttttgttttgttttttggttttttgagacagggtttctctatgtagctttggagcctatcccggcactcgctctggagaccaggctggccttgaactcacagagatcctcctgtctctgcctcccgagtgctgggattaaaggtgtgcaccacccaccaatgcccggcacaatgctctgtttttaccatccttaaattctcactgattttattttctaacttgggttctccaagtgaagtctaacaagacactgatacacactctggagcagaagagttaaggaaattcattctctcccattcctattcagctttcttagaagcctggtgggcctattgttcatggacattggaggagacacagaggaagcttagtatagcatgttatatctacaagaaagcatgcaaaacactaagagcatagagtttaactctccactctaatcagaacgtggtccaaacacagaagggacataatggtatctaagaaacaagacctacccagaaactgataactttattgcccatgttttctccatgcacggtcaaccatttatactgaaaaagaaagtagacaaaggaaaaactatgggaaaccatatgccttttttcttccaacttatatatttttagtaagccaaaagtgaagaatgttggtacgaaggaagtgaaatcaaaaagagaaataaaaacaactgagttacttttgggggtcaattctgcactggtaagaaagaaaatctgcatgcaaacatgagctgtgaaacactggctgtatgatttcaagggttcctcatatgatttaaaacactcttaaataggcacttagagctagcaccaaaaatatagagataaatgtaaagtatatgctagtagcttaattctaattttcctttacttaaaatgacattaagcaacaaatttcaaatgttatgacatgctgagaggaagaccatgggagaaggggaaaatgtcatattttagttcttttaatgaaaagctttcatgcttttcatacaaggagcttcacgttttcattttgctgggccccataaattatgcagctggcactgcttgcaaatagaaattttccacaaagggaggctctgcgcactcaccctgccggcatgagcattccaagacacgcggcagctgtatttctctctgtcacaaatgggtcatcaagttgagcatcgaactttgggaaggtgccaggcagtattgttatcagcagagcacagctgcatctgtatgggggtggggacattctccatcagtcaaaaaggaaacttttctctccagcccgcacctgaccccatcacaagtagcagcttctttaggaatagactgtagagtggagcccaaatccagtcacaatacagtgtttaaaaaaacaaaacaaaactgacccaccttttgtgagacctttgggccaatagccaataagcaaatgatgcaaatgggactagcaaccctgacacagcccagaaaaataagcacagtaagaaaacatagccagttggctaggactaaaacatcacacatatcactttgtttgccttgagaagaggggattcaaattgtttaaagttatgaggtttgatggttccctcatactttggccctatgaacttgagttataccagcatttaaaagaatagattcccctattgcaacccacttccaactctcaccacaggcttttaacagacagccaatcaagaaagtttctcttcggaactgtgcttacaggcaattccaagacctggtgtgtgtcacctcacacgacaggatacatcaccccagccacttcatgcatgagaacctggaatgtctctcacacatggtgccagggaaggcacaaaggctgtgttcatgaacttcggcagttttacgaggctgaaagcgccaagatttctgggttggagtcctatcccactcatttcttattaagatgctccttcatcattggaaattcctttcagtcccaaatgactttagccttgttattgagccatttagttaaaacttaaagcttaagggctgaaaccctcacatccatcgaagccattagctttcgaccatccatgttcacatgttgtctaaatgctgcctctggggagaaggacattttattaagcaaaaacatgagtaatggatcgatttttttctctttcaaaataaaaagatgaataccctccattggtaagtagtgtgtgggaaacattctggaggagttcaaccgtggacttccctcatctctgctacttaaggagctgcttctggtagagttttcagaggtacctgggaaatgctgggggccaggggaattttgggagtcagagtaaatgagcatgggccaggctgtgctcctgaccaggcaaccttttctgcctgtctgtcttcttctgtctgcccacaggttctctgtttcatggttcagttgaaccatggatttcacagctgagctgctgcacgttcagattctgattcccacccttgactcacttagcaggtcaggatggagagagaacccaataatttaaattactaacaagtccattggctggttctgacatttgaattgtatagtgcttcagaaatccttaggaaagggagtgtctgtaaggaggaccctacagctgtccttgagtagtatctgagctcatagaattgctgattcagcacccaagaaggggtgaaaagcccagaactaaacaacctgcaatactctttactgcactctgtcaaagattccagcaagatgatctaacatgggaaagtgttgggaaatgctctacctgcctcctctttgctttgactattgaggaatttccagaatacagcagaaactaacattgaccctcaactgcagggttttcctcaagcaattcctttttaaacttatttggagtgattcttgatgtggactggactgtgtgactcaaaagtgtgttcaggtccttgatggggaaagtgcttctgtgtatatgttgtcttattgggtgatgaataaagtactgtttggccaatgaggcaacaagttaggcaggactaggagtcaaggaggattctgggaaatgtagtaaagaagtgatgatccaggaaggaaatgacacaacagggagactcatacataaacatgggcaagaaggaagtgggccccttcttcctccagagtcaccacgtgatcccagaatgaggatgccaatggaaggcatcctaaataagataagtcttataaaatatatagatttatgataattaagactttgctaacagatgagaaatcctagtcattggccaagagcatttgtacccaatagaagactctgtgtattatttggggccctaactctacgggcagaactcacatggctggcggaaagtgcccacatggcggtagggctcaggtggtttttggcagaaagatttatcataacaggtcctgatgcctagcatgcccaaatcagcccttccaggagggaaaggttgagaggccacactagagaaaagcgtccttatatcaagacaatatgaagaggggaggagagaatgccatatgacaaaggcagaggttggagtttgtgacaaagagccaaagactgtaaccctggaatcaaacagaaaagcaagaaacagattctaattgtgatgccgtgatatcaaatttctaagcactacaactatgagagaactaatttctgtcaactaaggcactcagtctgtggcactttgctatggcattactggggattctaacacattaccaagtcagcgagtggtagatatgattttgataaagattgctttttgtttttcatttccagtgaaggaagatggaagtttatccagactcatccaggcatttgtgaaccttctgcctaccatcattcaactgcaacaagctctatttctgcagtctccatgtatcatcacagcactctttgggactcagcaggctgtgtggccctgccactccatgtattttatcttttcacagaaagaggtcattaatttgtttcaggtgtggtgttaaaagacttttaaaagaatgtttgaacagaataaatgatctctgtgtaaaaggattcccaaagattatgttcacacagtggcaggaaagcatcacatgtgctgaatgggccacgtttccatgtaagagataaaaaagaacttcctgtttttaatctcactggatactgtgtaattaaaatgtccagtcaagataacccattcttccttacaagccactggacttaataggggagactaaagggaattggcaaatattttaaagcaaaaatgtatttgaaaaggaacatggttctgataagggattcaaagagtaatctggatttcagaattaggacattgagttttatttggaaagaaaaaccaaagaatagaaatattattttagagaaagatacagtaagtgtgggagttagattttacaagtcaaaaatacacatgatctagtataagacctttttatttgcttaaagatttaaaatacttttataaaacatgttacacatgccaagatgcaagatgaagaaagaaaagcagttctggtacccttcccatgagctggtgatacaagtggttagccatcaatcatctccctggaagtccctcccccgccaggtacatgtcttccctgcctttgcctctctgctctgctcttctgaattccttatttgtaagtactgacaactgtaaaaataaagttgctataatcatgtatagacacatatctgctctgtatcttggcattagccaaactgtcacagggcactctgaactctcaacagtataagcaacagatgataattcccatcacaaaattattcataagcagacatttttagtaacaattggcatttatatagtgaaattgtaattcaatgaaaaattctgtatgcaaataaactttgaaaaaaaattccacaaaaaccttttaataccaaaaataatatataaaatgaagtgaaatatttgcataaccacatacactcatttattcaacaaatattcatagtgtacaccaaggtctgccaagaaccatttggcaccaggaaaactactgagatgcaaaccttaacataagtatgtacatataattgtatctcataaacaagtaaaagagacgaactactatatatcaaagtaagagcattggtagaatatcctagatctcattgagggatgatgaaagcctgtctagattctgtattctcctactccctgcttcctgctcagaaggattctgggtctgcatcttcctgcctgaacctctgataaccattccaaaaggagagtttggattcagtggctcagcataatcagggtttggagagatagaaatgtttgtcctgtgtggccatcatacagtctacacatgtattcaaataccatgtgatacttcagaaatgtatacatttttgttttatttaccaaaaaaataaagattatctaggactgtgaaggagctataaaacagaattctttgtagtttacatttttaaaaattgtaaatgtaggcatataatactttccaatattcttctagaatagttctacagaagagctagatctggtgctatatatttgccttcagccacagacatttccagttagccagtactgtccaaacaattattctaacctttccatttccaacatatgcatattaaaataaatcttaaatttatatcttgcatattgttaaggttgttttggctgcaagcaacagaaagtgattctgattctgattgagcaaaatggcagaagttcattaaaataaaaggaatggttgagccttgagacatggagacatctggaaagtctctgtggtggtgtagaagtagcatctaaggagctgacttatccctgacttggtcctggtgagctttaatgtacattttcttataaattgccatgtgcagcttcgactcactgagcatctgactctgggagccccaactttagacccttgcatatttatatcaagtgtccccaaacaccccattctgggacaggctgaaccccctagctctacagcagggaagggagaaaaatcacaagtatatagggatagtaaaagcattgcacccttgaggacagttagaagttaaactatttccaaccaaaggtagtattatttatccaataatataaaaatgtagtcatgaggaagagaagccagaagcccacccagagcaagaattctgtgctctgctgggaccatggatcaggtactccagtatgactatttcaaggcctcctcagttagctttggctgggtggttttaagtgtaaaattttatgatgttattcatctgctgctacttgttcttctacttgaaagctccacccaggggaatactctgttctacctggggctctctcacctgggaactccagcgggctgtctcaatagtgaccccccactctgttcctgctagatattttcaagtgtctgatttggcagcatcaccttttgttgactctctcaatttggctactccagtgatcccgatgggatgtcctgggtgcctaatttcatgacatgttgctgtctacctgctgttgttcttcatctcttcttttgcttttgcttgctatatacttaataagcacactcattcaaaactgaaatcatagcaactatagattattctatggactgaagagttcatgagcttgggctttcacaccaacacagtctatagctcatattttttggagcaagaatctatctggcagcattttaatctagtgcctgcctctaggactccaaaaagcaagctcgccattcaccatgtctacacatggttatgcacccaaggctatgtgtatgacttttaaattaaaaatacattataaacattttctttgccattgaaacagggtctcatgtagtccagatgctggcttcaaatgtattatatagctgagaccctctttaagtccctaaacccttctgcctccacccccaagtactagaaaaatagtcatgaatcaccacactcagtctatgacatattttaaaaatatttcttaataaatattagtaataatttattataatataataagcaatgaatctcttgttttatcattgcttcttagatttattgggagcatgaaactcacagctatggggctacttcagaggaaagcatggattggaaggtagggaaaaggaacacaatatacagtctgatgctcggcattctcctccaatgagtaagatacatcgtgatttattcttcaccatgtggacatgaacagctcaagatgagtgagccacttacttactagccacaaacagatcagagttcccatgttcccaggatagaatgtgtttacttactaaacaactctaactagaacatgtgtctcattgaagaggcagcagagtgaattgttagagtaagtaaactgcgatcttcccaacattgccctgacaaagcagcattgccctgcactgaaactgattaaaaaccagaacaaataaataaaaatgtcatcatcaacaccaccccaaattaaacagcatcaggaagacacttccaccatggatccatcatcttcattagaagactgtctacacctaggaaatgcctccttcaagcagcaaatgaacctactttatgtcaggcagatttcataatgagcatgggcttgggttacaagggaaaacttatacatgatgaaaagtctgagtctaatgaaaaatgccaaatggaaaaagtaactaaaagagtgttgctcaaaatcatccctgctgatgaaatttcaaatcgatattgatgaatttggctcacccagtttttgctgagtggaatgggttgggttggtgagagaaattattttagttgtatatcttgacatgtcaatagtttttgccagcattcttctagctacacatgtggcatgcatttcttatttataatatataaataggacacgtttgatcttttcacaaagatcttttccaaatgggcctttatactctgtgtgttaaatgaagttcaatagagtcagccaggtagaccttttcaaccctcacttttatttctgataaaaatattataaagataaattttgtagatagtatgtgacataaagtatggccacaggtaaattattgtgtgcctatatttttctatgtatgtgacctctaacatgtaataaagagcatgttcccagacttatgagaaggtgagagggagggagggagagagagagagagagagagagagagagagagagagagggagagagagagagagagagctcaaggaaggtaggctgagatggggattgtgtctgaataaaacacattcacactgaatcaatgattatatacacagagactgcaactcatatttacagatatttatattgcactactatattaaatgagagatatgagcattccaagttgtaaatttagtattgtcgtactggcaataattccatttaatggcataaagtaaatgttgctcttagaggactgattaactctaaggacaatgtcaaactcatatcatttggtttgatataaactattggtttttaatctgacccatcacaaaatggaattccaccctgccttatgaattttcaatacatagtttaatagagtcacaaataatatcaatttatatataaacacatatataaatgtatgcttattttatttattatttattaatgtatattcaataatacatatgtaatgttgtgatattatatgtaaacaactttcgtgtgtgtaagtgtgtgtgtgtgtgtgtgtgtgtgtgtgtgtgtgtgtgtgtgtgtgcacatcctatagtactatcaagtgtttttccagatggctcttttttttttttttttttttggattttcgagacagggtttctctgtgtagcttttgtagcctatcctggcactcactctggagaccaggctggcctcgaactcacagagatccacctgcctctgcctcccgagtgctgggagtaaaggcacgtgccaccaatgcccggcaggtggcttacatgtagttggctctacatgtccactcgataaaataggcattgttattcccactttaccagagatgaagcagagtcacaggaaggccttaaatttactttgcatcttcatctagaagtctgaaccaacgtttgtgctcagggagccagaaacagaacatacattctcatacagcatgccagatcacaagggccagcacactggctgcaaagagtcaggcaaagtgtcttctaggctttgagaacacccatgatttttctttttcctttcatttcttaaaattttaattagaaagaagattagtttacatgttaatcccaggtcctactctctcccctcctcccctgcaccccccccccaaccaataccctacctatcccataccttttctgcttcccagggagggtgaggtcttccatagggggtcttcaaagtctgtcatatcctttggcatagggcctaggccaacccccttgtgtctaagctcagggagtatccctccatgtgggatgggctcccagagtcgattcctatgctattgataagtactgatccactacaagggaccccgtagatttccatggtcttcacactgacacccacattcatggggtctggatcagtcccatgctggtttcccagctatcagtctggggaccaagagctctcccttattcaagctgtttctgtgggtttcaccagcctggtatggacccctttgctcatcagtcctccttctctgcaactggatttcagttcagttcagtgtttagctgtgggtgtctgcttctacttccaccagctgctggatgaaggctatacgatggtatatgagttactcatcaatctcattatcaggagagggtatttaaagtagcctctcctctgttgcttagattgttagttgttgtcatctttgtagctctccagacatttccttagtgcctgatttctctttaaatctataatgtctccctctattatattatctcttatcttgctttcttctgttctttccccaactcaacctccctgccccatcatgtcctcctcaccccgcctcttctccccttttcattcttctagttccctcccccctccccccatgttcccaatttgctcaggagatcttgtgcctttccccttctccaggggaccatgtatgtctctcttagggtcctccttgtttactagcttctctggctagcttctctgaggattgtaggctggtaatcctttactctacgtctaaacaataatttttaaatatctctcagggttgatgattgcacaaatggctcaccagccagatttaatccataagacacattttgccaaaactagttcaatgcccaaattgctcatacagcatagttttaaaatattcatacaattaattgacaagtgacatcactttttatagatatctcttttttaagctcatttatttagttggttggttagttgatacatttgtttttgaagacaaggttttaccacgttacataagctggcccagaactcctgatgttcctacttcagcccaggattacagttgtgtacctccatgctgtctctttcttgagaattgccttccccactgctcaaccatctactggctgggattctgacgttctagatcttatcatgaggtcctaccacacagctccagctgactgaaccagagggctcatgcgacccaatctgggtgggagaactgggaattcttacatcaacagcccccatcaatacttgtagtttttttaaccagttacctaaactaaatatccccttttaaataaggttttccattgggtgtcatcagacattttttaaaaacccaatttattaaaatcaattaaagtggagactagacctgaagattgcctggggagacaaaggcagttcggccttataagagagatcttaacttgatttaaacacaacttgagctatttcttgaaaatgcctctgttaaagataaacagacttaagctcaactgagtgggagctgtgagaacaaggtgggccttgaatcagatagaactggaggcctctcagtggcctcagtttctgccacatgcaggagatctgggctgcaatgtgaggaagtgtatggtaagaagggtgggatgacagacagaaaatgtcccagcagagtcccatgttcagttagttccaaaagtccagctatatgacctcctcggctttcctagaaaactcaggtttccttgcaataacccccgcccatcccccattccagcccacacaaatctgactcttctggcattgagttttgcttcataaaacaagaaccaatattttttttttttttggttttcaagacaggttatctgtgtagctttggagtctatcctggcacacgctctggagaccatgctgacctcgaactcacagacatccgcctgcctctgcctccctagtattggaattaaaggcgtgcgccaccaacacctggctaagaaccaatactttagccacacctttagccatttttatatttttttattattattttttggggggggggggtttcgagacagggtttctctgtgtctttggaggctgtcctggaactagctcttgtagaccaggctggtctcgaactcacagagatcctcctgcctctacctcctgagtgctgggattaaaggtgtatgccaccaatgcccagctagccatttttaattagccaaccttcttggacttaggaaatggttttcaggggattgattcagcaagtgtaagtcggttctagtcatccatgttactcagaatgtcttttcaccaatctccatttagacgtttcaaatatacctttaaagcaatttccccttcctccagtgatacagtcaccccgagtgaactgatgctcaccgcacttctgcagcctgtacactctcagtgcctcctcagtacttttcttaccttaggctgctttctatcacaaaatacagtgcctgagtcagaataatcactccatctatcttaagtttcttaaggggtaaactgaggcacaataacttttcaatatttttacacacatgcatgtgtgctcctatacacacacacacacacacacacacacacacacacacacagtgtgtatgtctggggatgcataaatgccatgcagttcatatgtggaaatcacaggacagctttcaggagtcagttcccttcttcctatgtgggcttggtggcaagcacttttacccaccgagctatctcactggcccacaacaatatcttttaatgattttgtttgttttttttaaagaaaaaaaatcaataaattgaaaagttccaaaccagaagtggaggcagcttctatgatttgaacacaaaagcaaagcaaggaaaatgtgtgtttggttacaattaggaagtcccttgttatataagtcacttggctactcagttgagcttaaatctgtttatctttaacaaaggcatttacaagaaatagctcaagttgtgtttaaatcaagttaagatccctcttataagggagatctttgtctcctcagggaatcttcaggcctagtctccattttaattgattttagttaagttgattgtttttaatgtctaatgacacccaatggtacctgtttatttaaagggaacttttagtttagacaactggttataaaaaacagagaagtcttatttaaacctgaaacttcacataaagcaagaaataataactagatacaaaacagtagaagaaataattcagcctttctgttaggatggctatccttagaggaaaacgtaatgaatgtgacaagacagtagtttgatgctatagaaaataaatttaaaatacaaataattaaatccagttggaataatgcatatggaactctcaaatcttttaggagcctcaaaaaagccttatgtatagaatcaatgaaggccatttatccatcatttcttgttcagaaatcagaaaaaagtcatacttccagggtaccaaatgacacaaaacaaacaaaaaccctctttttaaaaatgtattttgtaggtgtcacacacctttagtcccagagctctggaggcagaaacaatcaggtatctgtgaatttgacagccttgtctataaaatgagttccaggacagtcagggctacacagaaatcctctgtctcaaaaataaaacactaaagaataaataatgtgttatgtagagtagccaagggattgcccatcttgtggggtccatatcaatagccactttgagtttaattcagccagccaagtgaattgactattgtggatgggtgtggtgtggcaaagggaattttttttctttaaagtaatcatttggaatggagattgttctaaactcaatgggctttccagatctctcctctgtactatcttgagagatgccagcttcagcatgcatgattcccattgagccctcacagtttaaccaatgatatggatgcaatttgattacaaatagagtttgacaacacacatttgttaatgaaaattctcacagagatgtctgaagacctgcaaaattctaaagatatactcagtgacttccacaactaatctcacttcatctcctccaccatagaagcacttttaatggttctttaactctatcttccaatttggtagatcagttgcaaacagtaccattggaaaactaagaacctacattacttcagttgcaactgtttttatttgagcacttggtctacaatgaccattatctaactgttgcccagctacattctccttgggatcctagatgtttctttgctacatgggatagcagttctttggtacccacatcccaaagaagattgctttttactttcagactttgtcaactaatcccgttacatctaaagagactgcaagtatacactgtggctggccagtatagacttttgagacaatgctgcatacataagaagacaacccaataaacaaacaagtaatagttaaggtgttcctgaaatcctcaactgcactttcatggctgctcatagatacactttgctaggcagccccagctgagacagaacgtttaacagaacagcaggaccccaatcaggatttagaggttcatcaaagaaaagaaaatacactgcctgtgataaagaattcacatccagtcaaagaaggatgtgacatgttgcaaaagcttttaaatgactgtgctttattgcagtttatcacttaatgtagaataaatcagtcattatccagaccccacatataaatattcacacatggggtgactaattaaagagagaagggagagggtgatacttgacttgatgccaccatttgattctgaatcttgactatagcagttgaatctagacttactggataatagtactattataacagtcaacctcagtgagagttaatatttttaatacactaattacatatcctatctggtttaaaaatcttatttcaggagctaaatgagtctgttaggaaatgagtagccagtaaaatagcctcatagtgatgaatctgatttttctctaacagtatccagaaggaaatgaccacaaaaggccgactcaaagtagctgaacatgacagctggctaggccaccaagccagcccactgtcagacactcatccatatggctatgtgatatgcaataaggacatagagagctatgggaatgcagattgaatgcacttaaaatacagaaacattgttagaggtcttctgtccaaagcctgatattaacaagactcaaacccctcaacacctcaacagcctacaggagtgcacatcccttgatttgtgatttagaaaccattcttctgctgcagttggtatctagggaagcatccttggcagtggagatacacacacacacacacacacacacacacacacacacacacagaattaactgggaatcatttcttagacgagagtcaagattgaacacaaaaagaattaacctgtgatggaagaataatagcctcagccagtgccacaggaggctcagaaactggattagcacaggagaattgtctcaagttaaaacagaggagtcagttatctccatttcatagcctgttgaatgcaagccacacccagagagagcatgtgtgtgaaataggatgaagaagctgtagtctgaaggtgttaccaccaaagaactgagctgtaagtggtcagcagcaatcacccgtggcagctgaagaaataagtaccaattgtcctaaagtaagacacaggtgtgccacagacacaatggaaatcacaccttgcctctcaaaccttttttctcatataacaagtgcacttcatcaggcagtagctcatataaagttatttctggcactttctctttcttgatgaaactctcaagatgtttattgaaattttcttttaaatttcattttacgttccaactatagttctcaaccccctacctcctcccatccctttttaccctccccaacccctgccgcagcccatcaccagaccattcctcctcaagggtaagggctcccatgaggagtcaacaaagtctagcacaacagtttggggcagaaccaaggccctctcccatgcattaaggctgagcatggcatgccatcatagggaatgggcttcaacaagatagctcatgtaccaggtttgtatcatggtcctatctccagggaccccctcagatagtccaagcttcacaactgtctacatgagaatttctaccattacagatggctatgtagatctatccagtacttactgtctttttccacttcccattctagagccccagaacctctgatcatccctctgtagctcttagtacattaccaggtggggagtcaggctctcgttcctaggggatttgagccccccccccatcatcatgcatttctcaggccacatcaacaatacttgtcagaatataatcaaaattgtgtaaaggaagcaataagaataagtactagagcccctaagtagcatttgtactcttacttccttctcttgtgtagctcaatgcttctcataatgacctggatcaaattactcctaaatggatgctaatgtatttccttgcctgttgatctcttagcccaaggattccaaatgatctggtgacatccacagtcagcagtataacggaattcccatagtgttcccagataatggatatcttctgtctctaaactgaaccaagaactaagattatgaaaacgtggaatgtaacattcctctgagatagtggggagtgtgaataagtaaagctaattccatgtccaacatttggtccctagacccaagaatcggaactcttaggcatacaaactatgcaaattagaacatgcgtccaaacctatgtgccctgtaggtgcctcatctgcatcagacttctagaatgccaccctacttctttagcaggctgatggcttctgaatggtagaataaatgattggatcaatgggtcctttgatatgatcatcatcatacctgttgtgatttcagagagcttctttcccaaggtaatatcacaaggcattctatttcagtgacttaaatgctctatcaggtatcatgatatggggcccatgccctgccataatgcaaggtaactcttataactggacttagatcagaaccaaaagacacacattattggttcactcagaaggatagtgctcatcagaacctccagtagaccctaatagtagcctggacatccagcagtgactaacacctgactcagcatcaatgagttgggagcccatgctcttgggcccatgtagaccttccctgacctgccgttattgaatctctgtttatccatttaccactgtaacagtggtgtagtcaaagactcttaactgacatcagctgtttgagtcagtccttgaagaatgttccctagtgggaaataacaagtgactcaaagccttctgatttttattcctgtctctaatattcctccaagctcttggcaaattctaccatctgtcactactcataaatctatgtcaatttctgtatcaggttacatgtcttttaacatgtattactaagtttttcttcactataatgaaattcttaaggcaggaaagctttataaagaaaaactatatatttagcttagctcacaattttagaagctgacagttcaaacagtaatgcccagcatctagagatagcctcgcacttggctatgccatcttatggaatgtggcagtagtggaagttaatgttctaaggagagaatatttcttaaaatacaaagtccaagagactgaagatgtacaatatcctccaaatgacctgagtaccactaccagactccatcttaaaaaggtccaccatcttccaatacaacactgaggacaaatctggtacatatgagtcttaaggttacaaacaatatctaaaccatagcaccacttatagggataacagatgtaccagacgaaactcctaccactgagaaaaatcttcccaacatattcctttgaagctatacaagggtagagctataggaagcctcaaatcatttggttcttaagctcatgaactaatccaatccatccatgagccaactgcagcctttctttcagctgtcagctggagccagcacttcaccatggtaggagccaaggtagagaagctagagaaggggtagatggcaaggtagcctaggcatatgcttagcatcttattcatgttgtccaaccatgtggtgatctattccatgtgcactggttctgtcttataacaggttgctactgggccttgtctggctttaaggctcaatgggtctaagacctaagactatcatgatccataaactctgtggtctttttttaaccacacagtcatttcttataccacaggatattctgagttgtataacctaacaggcaccttcaacttccttcataaactttcacaacactggaccctttctaaagatgtcagcctctctgtggatgggtaatacagagtagcattccccaatgtaagctacattgccttcagaactagtatgattaattagacattgtgcttctgtcttggtgatgtaacatttttctgctgtcattacatttgatgctttgacatgtgtcaaaccatacagtctctaaaatgtaactgatctcatggtgcacttctctctcattctttggcctccagtacattttcataattttgtcatctgatccaaataacaagattccactagtgttgtgtaacaatgtgatggttgatagcatatctaaatgagtatggtttgctttagacaattgtgatggacaaggagagagtaaaaacaaacttgggatggactgatgaatatatattgatgatcaaacatttgaaactgtatctggccttctttacaaggtcacagtagaaactatttgccaagtcaatgagcgtataccatgtacctgaggatatattcaccacaaagcttagcacacctaatataatggacatgactgggactgccacttggttttggggtaaggacattactatcatcccccagtgtcatttgaagtttataagtaccagtatgtgcagtgaattatctgaacatatagtaaaaaccaacatcccaacattaattggagatttaagattatctcagatatttatagatctagatgagtatgtatcattacttttatttactttcctagatgtcaggtatatgacagatttaaagtcttctaactggtcttcatttatattaaggtacttcccacatagtccatagtactaatgtgagggatcttcctattaacttatggtattcattccaatttaacattcaggaaacaaggaaatgactgggtgtggatcaaatctcaccagtgtctcacttaaaacctagcccctgaatatccctagtttaataccagcaaatgatgataactgagggtaactaaaaactaaggttaactaaggatgtttgttcaagaatcagtaaaatactttgttcatgtcctttggtttatgatttcccaggcaaatgcttataggtcaactcggaaaatactgaagctatagtcaatgtatgttgatatggacttccctctttctgaactcaaccattgggttgtacttctgtagatcgccttaggatttaaggaagactactaactgtgactatcttctgaggatatctgagatctccaacattttctttattcaattgtttcttggaagacacctaggctgattccataatttggtaattgccatcagtgccacaaacatgagtttctgtagtgtgttgatttatattcctttggatattcttttctaggactggtagaggtgaaagctacagaaatgccatttttagatttttgagtaaccttcatactgacttttacagtggctatactattgacatttctaccagttagggactaaggatttctttcctcatcctttacacacctttgttgttatcctactgttttgactattttagatggatctcagtgaggctttgatttgcatttcctcaacctctaagatattggacacttttttcatgtgtttactgcccattgtattttaacttttgagaattggctgtttaattagtgtatcttttttatattggctaccttataacttagaatcaagtcccagatcatctgggttgcctgcttttcagctataaagggtatgaacttctttccacactgccatgtgctttctggctttcacacacaggtctatactggagaacaactatcttcagcccaccattgtcttttgtttaataattcaatagattatagcaagatcaatctaagcccattccacctctaacacatgaagatttcaaaagttgaaaatactacactgagtgtgttatcgctatccatatgtgcttcttccaagtttaatgccagagaaaaatgtaacagttgctatgctactacatgacaggggttgtcaatatacaatccaccaccattaaatgaggacttgctcacagccagctgactggggataatgtttctcaatcccacttgagcatctattttccaagacagtttttgattccagtcctcacaggtcataagtcaggctctaaactttaatatggaagtttgagtgaacagtttcctgggggagttgtctttacaataacaccaatgagggaatatgtcacaaagtactgagaataagaataagctaaagtgtcagacatttatagctgaggccttaactgattttgtgggaaactttggaactgaatgactcttcagtgatgcccttatttgaagcctgggactgaggcttttctggggctaaggtttccatttggactctctggacatgggctttccatgtccaaaggttgtaattttgagtaagacagaactctttggccaattgacaattcccagggaggaagtcaagcatgagtctttaataggacaaacttgtaggggctgaaatcatggttgtaagtttaaaaggggaagctgagcatataccacagcatctgtgatgttatctatgaaatgaaagtgcttagagtataaaatatcctttaatctgaaggactgtacacatcattcaggagtaacaaataggtttatagatactttaatgaagagcaactaaagagagtagatagaggaatacagatttgtcagcatgcttcaagcattgaaccagaaaatgggtgtcttgatccacatgaaaactagtaacttgatctaatatgtgctcttctgtgagcttcacaaatatgctggttaattcacatatgagcttatgtgttatgtactgtcagtgtcctatttttcagatgacttctcatttgaatgtaaaccccagctatctatgttttgagtcacttgttaaactgatttcattatttattatgtcatttcatatttcaagtacttaacatgtattaattactaattatgagatcgtatatattacagactgcatttttatagagaaggtcactaaggacaaacaggccctgtaaaaggcctccttttcatcacttcatttatcaagtaatcaattagtaactatatgtctgtcttagtctgttttctgtttctataacaaaatacccaagaacaagaaatgtataaagaatggaggcttttatcactcaaagtccaggagtctgggaagctcaagaatattgcctcagcatctgtttggctaaaaagtgttcttgccgcagaggtacaggggtacgatggggcaactcagagaaagtgcatgaataacctatttctcttcttataaagtgactaaactgtcccagctacctctgcgatcattcatctaaacacaaatacctcctaaaggttctgcttccaaatacaactaatgcttgaatttagttctgtttccaacacaggagcttataggcaacatattcaaactgtaactgtgaccgtgaacaggtgacttggcctctctaggcctgttcccttatatgtaaaatagggcctacacagtggtttattgatatgcaatgttctcctctaccaaagtcattatccataattaagttattattataaagagaaactctggtgtccagataagcattcctctttattggatagatgtgtttcttagtttgtataaatttattttcattctaattcatgaattagcattttgtagagccaatgacctgatagtgtgtctagaaaccccaaggtaagttgacaacctgtttactgaactctgtcatattgaagggtttggttctatccaaccaagccctccagcttagtatcagggatcagcctgtgactttgagaagcaaagactacattgagaacatactattcagaacaggcccagtcagacagcaaatcaatgcgcagttggtagaagtgtgtcacagtcattgacatctctatcctggacatactactcttgccatgtcagaattcacattcttctatctgccctgctctgtttcctgggatggtaatttatgtaaatgatggcaatgaaccccaatcccctccagttttctgttggatttgataatggggtgtggaataacgaattagatgtcagagtgattgagaagaggaaaactgtttgtgtagaagcacttcctccctctgagtttttcctgatataacattacgatcctgggacatccttacagctttatctcctgccagtaacacagctagacctggagttactgccttagatcatctacaataatgggactgtttctgagattaaaaggagggatcagaaaatttataacccattcattttatctcaagctctcatttgagaggaagttctgtagaagactgagatattcaaggagaccctctttgccttcagtcacctccaaactggttagcctcttggcctaaattctaatgcctgatgggccatttcccctgacattgtcccatatcaactttgtcacaggtctccatacagctctgggattcctgtgaatccttgcttgctgaacatttcgtagcaagataaattgcaaagcattttagaatccaggcttgtagaagccacagtctagctgtaactctgtctctgtgtgtgcttgtgtcactgtcttccacctgggcagccatttccctgtttatcagcagcagacagtaagcacagctccttcctctccttctccccttttagcacatactcgctaacacctagtcactttcccttgatcccttcctgaccctgcttcactccagaaacattatggcctttcttcttaaacatgactttatctttgccatatgtgtgtgcacattaacttaagcactgctgtgtttgggggcatgcatattctccttacatatgagcaatcgctgcatttccttatttatatcattgaaatatagcttatgggtaaatagaaatggccaggctacctggtaggtctaaccagactctcctcatatgatataatatacaacaatttattttaaacccatgaatacgggcgtgcttattttaacatgtcacagagagacagtcacatgtgtcatgagtttaacagaatcctgatttccacacacatcctctgtcactgtaactagtttctcctcccttaggagggaggtggctaacatttcacagagtcaatcatgttgccaccgcatggagccctataaatgggagaccgtcttttacctttgaaatcaacaataccaagcaaagggttgaggctcaagtgtgtggatccagtcagacagaagacttggtgtagatgtaagatgaaattaccatacatggggtagggatgtcataggttgttttatttgggagaaatcacttacatgagaaaccgataacccagaatcagccctcagagcatccagtctctgcttctctctgaggcccaaccagaaacccaggagagagtcatgcttcctctctccaggtctatatcccacataccccatacatacctgtgaccatgcccatttggcttggtcagcgccacaggaacctgataagatctctccctacaactcagttattaattgattctccttgatctcccaactaaccattagttccagtgtgatctagatgccaacaatatgaaagatgatgggggatgtccttctgtatatatgtttctcttattggctgatgaataaaacactgattggccagtagagacaggaagatagatggtgctaggagacaaggagaatgctgggggagaggcagaggggccacaaagagatgccatgagacactgggaagataggaacataccaggcattctctggtaaaataaggccatgtagaaatatgtagattagtagttatgggttaataatgaagagagagctatccagaaagaagccctagccatcagccaacagttttataattaatatagtgtccatgtgtttatttggggctgaagtgactgtgggaccaggcaggacataaacctccatcttcagaaagagacttgtgagtatttaaaactcaggccaaatggttgaattctagagaacatactcatcataatcttgtataatcttgtgtaaaaatggtctccagacctatgattatgcacattgcacctgacttgtgatcccaggagagcaggacacaccgtttgacctgtgggtccatcagccatgaggaaggttccttctcatgagcaaatgtctccaaacagacaaactgactgagcctaaactgagccacctcctcacaagcattctttctttacttctgctcatatcactagacacagagatgctgtgagatatcatccccactctgtctggctgtgtgcatcaactcatttagaattttctagaagttgatacttaccaatctttcacaaatatacattgtttaaaaagataagagagctgaaaagtatgcaacaaagaatggtgccttgaatcagtctcccttataaggatccacttgtctagcaacaattacattccaccttgtacgaaactcatttttctaattttctaaatattgttaaatattgtgcttacatttttctttcccaatttcaattttattcattgttcattgatatttctttattgtcaaaaaattactttagctcttttataccattttccttcattcctccattaacccttcccatgccctactaatataagatatactatcatttcatatacacatttctgtgactactgaacacacacagaacaagtgttaaatgtaacaaatgtttgtttgtttcttaaatcatagagccttatgctttcctggatttgttcaggttgatttgtctctcataacctacattctcccagaacctcccactaaaaaattttgaaccttcaaataggttttgtaaattcacaaatcacatatttttctcttggcctttcttcttgctctagacttcactattgaactccaagcttaccatggctaacatcctgagttttatctttctgctatcctgggaaaccccctcattactttcccatgtaacattttctcttctctggacctcacatcttcctccagtagctgataaggagtgtgggaagtagattccttgaaatatcatctaagtgaaaatatatcattattgagcaatcatctgtggctgagattctggctctataattctatatgtaaaatgagtttggagttgcacacttgtgatctcaacaatcaggaggcagaatgagaagtatatgaggacaaggtcatcctgagctagagtaaaatccaagctgtaataataatgacagcaataacagaaacaattatgaacaaaatgaaagcaattagaaatcatgttctttcccagagttcgaaggcttacctctgttgtaatgtgccctgattccagtgttgcttctcaacaaagccattgtcatcacctcttctttgtgagttatgtttcaccttctcagtggcttggaaacttcctctttattctttttatggcaataagtcatagttctggtcatagatttggggactcattagatatctacaatattgaggtttatgcttcttctattatggaaatgttttaatgaattatttctttctaaaaaacaacagtcttcttggggctggagagatgtctcagaagttaagggtgcagcacccatatcagacagctcacaaacacctatatctccatctccaaggaatccatcaccctcttctggcctacaccttctatgggtaccttcatgcatgtagtacacacacacacacacacacacacacacacacacacacacacacacatctttttaagtatctcccatttctttctagaaatgttatctcatatcctgtcttctcctcgggcaccatgactaatatccccttttagtccacctcaactttccccaccaacttaatcagtatcatcatcaccaaatgtttcatagtttctctcaccttaaaaaaataataaataaaatttctccaaccctaaatctccccccagtcaacatctacattttcctcttttttttggtattttatttgtgtatttattttatttgtgtgtgtatgtctgtgtgagtgtatgccacatttgtacatgtacccaaggaggccagaagagaatatcagatgcctggaactggtgttagaggcagttgtaagccaccccacatggtactggtacctaaactacaatcttgtggaagagcagcaaatgctcattacctctaagccatctctcaagggccaagatctaaattttctattcccatttgagcatgctcctccagagggcagtcaatcaatatgtcccctatagctttattgaaatctactctgttgggcttttgcactataatggtcattctcattttccactctcatgcccataacatagagaaactccacatccataaacatagcggtcagtttcttactctctaccttgatttaaaattctatggctgctttacttggctctggacaccattctctctttattcttctactgcctgataggggctactgtctctcatatacctttgtaggtctaaacattgaggtttccatcggctttattcctctttatgccaactttcttggtgacttcacccaagctcatagcttacacagcatataaaatctaataacttcaaaattatatcctccaatttaacttcttccatagacttcacattttgtgttcagccctctgtctggtatcttaaatgtttactaaaacaccttcaacaatatggtcacatcttgttccccctccacctgctgcctgagcctgagccctccaactgccgcctgagacagggagagaccccacctgcacataagaaaagccattaatgtaatcagccatataaacaaacagaaaaagaaaaaccacatgatcatctcactagatgctgaaaaagcctttgacaaaatgcaacatcccttcatgataaaggtcttgaagagatcaggaataacaggaacatacctaaacatgataaaaagcaatatacagcaaacaaacagccaacatcaaaccaaatggagagaaactcaaggtgattcctctaaaattaggaacaagacaaggctgtccactctctccatatctcttcaatattgtacttgaagtcctagctagagcaataagacaacaaaaggaaatcaaggggacacaaattggaaaggaaaaagtcaaactttcactatttgcagatgatatcatagtttacataagtgacctgaaaaactctaccagggaactactacagttgataaacaccttcagcaaagtggctggatacaagtttaactcaaaaaaatcagtagccctactatatacagaagataaatgtgctgagaaagaagttagagaaacatcaccctttacaatagcaactaacaacataaaatatcttggggtaagactaaccaaaaacaagaaagacctgtatagtaagaactttgagtctttatagaaagaaattaaagaatataccagaaaatggaaagatctcctgtgctcttggataggtagaatcaacagtaaaaatgacaatcttgccaaatcaatctacagattcaatgcaattcccatcaaaatcccaacacaattcttcacagaccttgaaagaataatactcaacttcatatagataaacaaaaaacccaggatagccaaaacagccctatacaataaagaaacttccagaggcatcaccatccctgacttcaagctctattacagagcagtaatcctgaaaacagcttggtattggcacagaaatggacaggttgaccaatggagtagagttgaaaaccctgatattaacccacacaccaatgaacacctgatttttgacaaagaagctaaagttatgcaatggaaagaagaaagcatcttcaacaaatggtgttggcataactggattcagacatgtagaagattgcagttagagccatatctatggccatgcacaaaaggtaaatccaaatggatcaaagacctcaacataaattcaaccacactgaacctcctagaagagaaggtaggtggtaccctggaacaaattcgtacaggagactgctttctgaacatagtaccagtagcacaaactttgagatcaacaattaacaaatgggacctcctgaaactgagaagcttctgtaaagcaaagaacacagacagcaagacaaaacggcagcccacagaatgggaaaagatattcaccaattccacatctgacagagggctgatcaccaaaacatacaatgaactcaagaagctagacaccaaaacaccaaacaatgcaattaaaagttggagtgcagaactagagaattctcaacaaaggaatccaaaatggctgaaggacacttgagaaagtgctccacatccttagccatcagagaaatgcaactcaaaacaactctgagataccatcttactcctgtcagaatggctaaaattaataacaccaatgacaatctatgctggaggggatgtggagaaagtggaactctcctccatttctggtgggagtgcaaacttgtacaaccactttggaaatcagtatgactattttttcaggaaaatgggaatcagtctacctcaagatccagcaattcctctcttgggcatatacccaaattatacatactcataaatatgtacatatgttcaactatgttcatagcagcattatttgtaatagccagaacctggaagcaacctagatgcccctcaactgaagaatggatagagaaaatgtggtacatttatacaatggagtactactcagtggaaaaaaaaaaacaatggaatcttgaaatttgcagtcaaatggatggaactagaagaaaccatcctgagtgaggtagcccaatcacaaaaagataaacatgatatatattcactcattttttatttttagacatagagcaaaggatcactagtctacattccatactaccagaggagctatgaatcaatgaggaccccaggagaagattgcatagtcccccaaag
